(19) United States
(12) Patent Application Publication
(10) Pub. No.: US 2022/0220215 A1
(43) Pub. Date: Jul. 14, 2022

(54) BINDING MOLECULES

(71) Applicant: CRESCENDO BIOLOGICS LIMITED, Cambridge (GB)

(72) Inventors: Carrie ENEVER, Cambridge (GB); Colette JOHNSTON, Cambridge (GB); James LEGG, Cambridge (GB); Pavel PISA, Cambridge (GB); Martyna LEWANDOWSKA, Cambridge (GB); Iain SCOTT, Cambridge (GB)

(21) Appl. No.: 17/610,330

(22) PCT Filed: May 15, 2020
(86) PCT No.: PCT/GB2020/051201

§ 371 Date: Nov. 10, 2021

(30) Foreign Application Priority Data
May 15, 2019 (GB) 1906870.9
May 15, 2019 (GB) 1906872.5

(51) Int. Cl. C07K 16/28; C07K 16/30; A61P 35/00

(52) U.S. Cl. CPC C07K 16/2878; C07K 16/2818; C07K 16/3069; A61P 35/00; C07K 2317/21; C07K 2317/31; C07K 2319/31; C07K 2317/565; C07K 2317/569; C07K 2317/622; C07K 2317/76; C07K 2317/92; C07K 2317/94; C07K 2317/33

(57) ABSTRACT

The disclosure relates to multispecific agents that simultaneously bind CD137 and PD-1 and which comprise a single domain antibody specific to CD137 and a moiety that binds PD-1, for example a single domain antibody. The disclosure also relates to therapeutic and diagnostic applications of such agents, for example in the treatment of a cancer.

### INTRODUCTION

[0001] Cancer remains one of the leading causes of death in the world. Recent studies have shown an estimated 12.7 million cancer cases worldwide. This number is expected to increase to 21 million by 2030 (Vinay and Kwon 2014).

[0002] CD137 (4-1BB, TNFRS9) is a type 1 transmembrane glycoprotein belonging to the TNF receptor superfamily. It was originally cloned by Kwon et al (1989) from the cDNA of activated murine T cells. It has subsequently been shown to have a broad immune cell expression pattern found on T cells, B cells, NK and NK T cells, dendritic cells (DC), macrophages, neutrophils and eosinophils. Expression has also been reported on non-haematopoetic cells, for example epithelial, endothelial and smooth muscle cells and on tumour cell lines. CD137 expression is mainly activation induced, although low level constitutive expression has been demonstrated on some cell types including Tregs and DC's.

[0003] The 255 amino acid human CD137 protein (Genbank accession NP_001552) consists of a 17 amino acid signal peptide sequence, an extracellular region containing four cysteine rich domains, a 27 amino acid transmembrane region and a short 42 amino acid intracellular domain. It exists as both a monomer and dimer on the cell surface. The main ligand for CD137 is CD137 ligand (CD137L, 4-1BB-L, TNFS9), although interactions with galectin-9 which facilitates receptor aggregation (Madireddi et al 2014) and matrix proteins such as fibronectin (Chalupny et al, 1992) have also been reported. CD137 ligand is predominantly expressed on activated antigen presenting cells such as dendritic cells, B-cells and macrophages.

[0004] Interaction of the trimeric CD137 ligand with CD137 results in clustering of the receptor and recruitment of signalling molecules such as the TRAF family of proteins leading to kinase modulation and activation of the NfKB pathway. Thus, clustering of CD137 is crucial for initiation and regulation of downstream signalling.

[0005] Studies using agonist anti CD137 monoclonal antibodies in vitro and in vivo have shown that upon activation CD137 is rapidly internalised into an endosomal compartment termed the ‘signalosome’ from which it keeps signalling (reviewed in Sanchez-Paulete et al 2016).

[0006] Co-stimulatory TNFR family members such as CD137, CD27, OX40 (CD134), HVEM, CD30, and GITR are involved in sustaining the T cell responses after initial T-cell activation. In CD4+ and CD8+ T cells, CD137 acts as a costimulatory receptor that modulates T-cell receptor (TCR) mediated signalling. Ligation of CD137 together with TCR activation promotes proliferation, cytokine production, and inhibits apoptosis through induction of anti-apoptotic B-cell lymphoma-extra large (Bcl-xl) and B-cell lymphoma 2 (Bcl-2) pathways. Cross-linking of CD137 on NK cells has been shown to stimulate IFN-gamma secretion and proliferation. Dendritic cell responses to CD137 stimulation include enhanced maturation and antigen presentation and secretion of cytokines IL-6, IL12- and IL-27 and enzymes such as indoleamine-2,3-dioxygenase (IDO) which can modulate T-cell function. CD137 can also upregulate intercellular adhesion molecule 1 (ICAM1) and vascular cell adhesion molecule 1 (VCAM1) on tumor vascular endothelium, thus inducing effector cell migration and retention of the activated T-cells in the tumor microenvironment.

[0007] Cross linking of CD137 by anti CD137 antibodies has been shown to have potent anti-tumour effects in vivo in a number of models including sarcoma, mastocytoma, glioma, lymphoma, myeloma, and hepatocellular carcinoma. CD8+ cell depletion studies have demonstrated that this effect primarily involves cytolytic T cell expansion and infiltration resulting in tumour cell lysis. However, contributions of other types of cells such as DCs, NK-cells or CD4+ T-cells have been reported in some tumour models. Furthermore, anti CD137 therapy has been shown to trigger an immunologic memory response and to inhibit autoimmune reactions (reviewed in Vinay et al 2012).

[0008] It has been shown that existing agonistic therapies result in systemic CD137 effects leading to unwanted side effects. Activation of CD137 signalling has been associated with severe toxicity in murine models. Clinical trials of a fully human IgG4 anti CD137 agonistic antibody (Urelumab®, BMS-663513) reported neutropenia, elevated liver enzymes and at high doses severe hepatic toxicity resulting in trial termination. This severe toxicity has not been observed for a fully human IgG2 (PF-05082566) that is also in clinical trials both as a monotherapy and in combination therapy approaches.

[0009] Agonistic antibodies targeting co-stimulatory TNFRs have been shown to require engagement of FcγRs (Bulliard et al). Thus, non-targeted clustering via FcγRs may influence the mechanism by which agonistic antibodies act on these targets.

[0010] The Programmed Death 1 (PD-1) protein is encoded by the PDCD1 gene and expressed as a 55 kDa type I transmembrane protein (Agata 1996 Int Immunol 8(5):765-72). PD-1 is an immunoglobulin superfamily member (Ishida 1992 EMBO 11(11):3887-95) and it is an inhibitory member of the extended CD28/CTLA-4 family of T cell regulators. Other members of this family include CD28, CTLA-4, ICOS and BTLA. PD-1 exists as a monomer, lacking the unpaired cysteine residue characteristic of other CD28 family members (Zhang 2004 Immunity 20:337-47). Its cytoplasmic domain contains an immunoreceptor tyrosine-based inhibitory motif (ITIM) and an immunoreceptor tyrosine-based switch motif (ITSM) that are phosphorylated during signal transduction (Riley 2009 Immunol Rev 229(1):114-25).

[0011] PD-1 is expressed on B cells, T cells, and monocytes (Agata 1996). The role of PD-1 in maintaining immunologic self-tolerance was demonstrated in PDCD1−/− mice, which develop autoimmune disorders (Nishimura 1999 Immunity 11:141-51, Nishimura 2001 Science 291(5502):319-22). The PD-1 pathway therefore regulates antigen responses, balancing autoimmunity and tolerance.

[0012] There are two ligands for PD-1 that mediate its regulatory function. PD-L1 (B7-H1) is normally expressed on dendritic cells, macrophages, resting B cells, bone marrow-derived mast cells and T cells as well as non-hematopoietic cell lineages (reviewed in Francisco 2010 Immunol Rev 236:219-42). PD-L2 (B7-DC) is largely expressed on dendritic cells and macrophages (Tseng 2001 J Exp Med 193(7):839-45). Ligand expression is influenced by local mediators and can be upregulated by inflammatory cytokines.

[0013] PD-1 is known as an immunoinhibitory protein that negatively regulates TCR signals. The interaction between PD-1 and PD-L1 can act as an immune checkpoint, which can lead to, e.g., a decrease in tumour infiltrating lymphocytes, a decrease in T-cell receptor mediated proliferation, and/or immune evasion by cancerous cells. Immune suppression can be reversed by inhibiting the local interaction of PD-1 with PD-L1 or PD-L2; the effect is additive when the interaction of PD-1 with both PD-L1 and PD-L2 is blocked.

[0014] As T cells become activated and co-stimulated by antigen-presenting cells (APCs), T cell expression of PD-1 is induced. PD-1 engagement with ligand on the APC cross-links PD-1 and clusters it into the T cell receptor (TCR) complex within the immunological synapse (Yokosuka 2012 J Exp Med 209(9):1201-17). Within the T cell cytoplasm, PD-1 signalling domains ITIM and ITSM are phosphorylated. This induces Src-homology-2 domain-containing tyrosine phosphatase (SHP1/2) that attenuates various components of the T cell receptor (TCR) signalling. T cell activation is dampened, which leads to a reduction in cytokine response, proliferation and cytolytic activity. This downregulation of T cell function serves to prevent overstimulation, tolerising cells against weakly immunogenic self-antigen.

[0015] The PD-1 pathway can be exploited in cancer or infection, whereby tumours or viruses can evade effective immune recognition and T cells demonstrate an ‘exhausted’ phenotype. PD-L1 has also been shown to be expressed in many tumour types including urothelial, ovarian, breast, cervical, colon, pancreatic, gastric, melanoma, glioblastoma and non-small cell lung carcinoma (reviewed in Callahan 2014 J Leukoc Biol 94(1):41-53). The cytokines produced by cancer stromal cells can further upregulate PD-L1 in the tumour microenvironment (He, 2015 Nature Scientific Reports 5:13110). As a result, tumour-specific T cells become unresponsive through PD-1 signalling and therefore fail to eliminate their target. T regulatory cells (T regs) have also been shown to express high levels of PD-1 and they suppress the anti-tumour response further (Lowther 2016 JCI Insight 1(5):85935).

[0016] Disruption of the PD-1:PD-L1 interaction enhances T cell activity. An anti-PD-1 monoclonal antibody demonstrates blockade of the interaction between PD-1 and its ligands (Wang 2014 Cancer Immunol Res 2(9):846-56). T cell function in-vitro can be enhanced by PD-1 blockade, as demonstrated by improved proliferation and cytokine responses in mixed lymphocyte reactions of T cells and dendritic cells. cytotoxic lymphocytes (CTLs) derived from melanoma patients has also been shown to be enhanced by PD-1 blockade in vitro using the antibody OPDIVO (nivolumab), and can become resistant to Treg suppression (Wang 2009 Int Immunol 21(9):1065-1077). This antibody has been tested in clinical dose escalation studies in melanoma, non-small cell lung carcinoma (NSCLC), renal cell cancer (RCC) and others. It shows improved overall survival rates compared to chemotherapy in NSCLC patients. Another PD-1 blocking antibody, KEYTRUDA® (pembrolizumab), demonstrates responses in NSCLC patients refractory to CTLA-4 blockade. OPDIVO® and KEYTRUDA® both functionally block the interaction of human PD-1 with its ligands.

[0017] It is possible to induce PD-1 signalling by cross-linking it on the membrane with a combination of anti-PD-1 plus anti-CD3 antibodies (Bennett 2003 J Immunol 170:711-18, Keir 2005 J Immunol 175:7372-7379). This function could be detrimental during an anti-tumour response because T cell activity would be suppressed. If suppression of T cell responses were desired, agonistic anti-PD-1 antibodies or those with effector functions could be used to treat immune-related diseases such as rheumatoid arthritis.

[0018] Single domain antibodies that bind PD-1 are described in WO2018/127709 and WO2018/127710 incorporated herein by reference.

[0019] In light of the toxicity profile observed with existing therapies, there is a need for alternative cancer therapies based on the use of alternative CD137 binding molecules that have reduced toxicity. In particular, there is a clinical need for targeted CD137 agonists that effectively engage CD137 on the surface of cells and have reduced toxicity, including liver toxicity.

[0020] The invention addresses the need for alternative antibody-based treatments for use in the treatment of a cancer.

### SUMMARY

[0021] The invention relates to novel antibody binding molecules with specificity for both CD137 and PD-1. The inventors have identified single variable heavy chain domain antibodies that bind to CD137 and inhibit binding of CD137L to CD137. They do not cause CD137 signalling when bound to CD137 in monospecific format, that is without being linked to another moiety that binds a second target. However, when linked to a moiety that binds a tumor specific antigen, the single variable heavy chain domain antibodies elicit CD137 signalling. Thus, whilst the single variable heavy chain domain antibodies that bind to CD137 do not induce clustering of the receptor and do not have agonistic activity when bound to CD137 without a binding partner that targets a second antigen, the dual engagement of CD137 and PD-1 in a bispecific molecule leads to CD137 agonism. The single variable heavy chain domain antibodies that bind to CD137 can therefore be used as a subunit in a multispecific binding molecule that simultaneously engages CD137 and PD-1.

[0022] Bi- and multispecific molecules described herein bind to CD137 and PD-1 and simultaneously engage both targets. This dual engagement results in CD137 activation, thus restricting the site of action to a target site and potentially minimising undesirable effects of existing therapies.

[0023] In one aspect, there is provided an isolated binding molecule comprising or consisting of

a) an antibody or fragment thereof that binds to CD137 and
b) an antibody or fragment thereof that binds to PD-1.

[0024] In one aspect, there is provided an isolated binding molecule comprising or consisting of

a) a single variable heavy chain domain antibody that binds to CD137 and
b) a moiety that binds to PD-1.

[0025] In one embodiment, an antibody fragment, i.e. a single variable heavy (V_{H}) domain antibody is used i.e. a V_{H} domain antibody that binds to CD137 is combined with a V_{H} domain antibody that binds PD-1. As explained elsewhere in some embodiments, the molecule such comprises or consists of two V_{H} domain antibodies, it does not comprise any other parts of an antibody; e.g. of and antibody that binds PD-1 and CD137 respectively. As explained elsewhere, an additional moiety to extend half life may be included.

[0026] Thus, also provided is an isolated binding molecule comprising

a) a single variable heavy chain domain antibody that binds to CD137 and
b) a single variable heavy chain domain antibody that binds PD-1.

[0027] In the aspects of the invention, the single variable heavy chain domain antibody that binds to CD137 does not cause CD137 signalling when bound to CD137 as a monospecific entity.

[0028] In the aspects above, the moiety, e.g. an antibody, antibody fragment, single variable heavy chain domain antibody that binds to PD-1 is a moiety, antibody, antibody fragment, such as a single variable heavy chain domain antibody. In one embodiment, this binding moiety binds to PD-1 and does not block PD-1 function when used in on its own (i.e. when not formatted as a multispecific molecule with CD137).

[0029] Surprisingly, the inventors have found that although non-blocking PD-1 single variable heavy chain domain antibody as described herein have no effect on PD-1 function when they are used as monospecific entities, when formatted together with a moiety that binds to CD137, the resulting bispecific molecule does have an effect on PD-1 signalling. It was observed that less PD-1 is detected on the cell surface. Without wishing to be bound by theory, this reduction of PD-1 on the cell surface may be due to downregulation of PD-1 surface expression, or internalisation and/or degradation of PD-1, or cleavage of PD-1, or downmodulation of PD-1 activity conferred by the bispecific binding molecule.

[0030] In another embodiment, the moiety, e.g. antibody, antibody fragment, single variable heavy chain domain antibody of the multispecific binding molecule that binds to PD-1, binds to PD-1 and blocks PD-1 function, e.g. by blocking the interaction of PD-1 with one of its ligands.

[0031] The invention also relates to novel V_{H} single domain antibodies that bind CD137 and do not cause CD137 signalling when bound to CD137 as a monospecific entity. These can be used in multispecific molecules for example with a moiety that binds PSMA or a moiety that binds PD-1.

[0032] Thus, in one aspect, the invention relates to an isolated binding molecule comprising

a) a single variable heavy chain domain antibody that binds to CD137 and
b) a single variable heavy chain domain antibody that binds PD-1
wherein the single variable heavy chain domain antibody that binds to CD137 does not cause CD137 signalling when bound to CD137 as a monospecific entity.

[0033] In another aspect, the invention relates to a pharmaceutical composition comprising a binding molecule described herein and a pharmaceutical carrier.

[0034] In another aspect, the invention relates to a binding molecule as described herein or a pharmaceutical composition as described herein for use in the treatment of disease.

[0035] In another aspect, the invention relates to a method for treating cancer comprising administering a therapeutically effective amount of a binding molecule as described herein or a pharmaceutical composition as described herein.

[0036] In another aspect, the invention relates to a nucleic acid molecule comprising a nucleic acid sequence encoding the binding molecule as described herein.

[0037] In another aspect, the invention relates to a vector comprising nucleic acid molecule as described herein.

[0038] In another aspect, the invention relates to a host cell comprising a nucleic acid molecule a vector as described herein.

[0039] In another aspect, the invention relates to a method for producing a binding molecule as described herein comprising expressing a nucleic acid encoding said binding molecule in a host cell and isolating the binding molecule from the host cell.

[0040] In another aspect, the invention relates to a kit comprising a binding molecule or a pharmaceutical composition as described herein.

[0041] In another aspect, the invention relates to a use of a binding molecule or a pharmaceutical composition as described herein for simultaneously activating downstream signalling pathways of CD137 and PD-1.

[0042] In another aspect, the invention relates to a method for co-stimulating downstream signalling pathways of CD137 and PD-1 comprising administering a binding molecule or a pharmaceutical composition as described herein.

[0043] In another aspect, the invention relates to a use of a binding molecule or a pharmaceutical composition as described herein for inducing a local T cell response in or in the vicinity of a PD-1 positive cell or tissue.

[0044] In another aspect, the invention relates to V_{H} single domain antibody that binds to CD137 having a set of CDRs 1, 2 and 3 selected from table 7 and/or which comprises a full length sequence as listed in table 7.

[0045] In another aspect, the invention relates to multispecific protein comprising a V_{H} single domain antibody that binds to CD137 having a set of CDRs 1, 2 and 3 selected from table 7 and/or which comprises a full length sequence as listed in table 7.

[0046] In another aspect, the invention relates to the multispecific protein above that binds to CD137 having a set of CDRs 1, 2 and 3 selected from table 7 and/or which comprises a full length sequence as listed in table wherein said protein binds to PSMA or PD-1.

[0047] In another aspect, the invention relates to binding molecule selected from Table 12.

### FIGURES

[0048] The invention is further described in the following non-limiting figures.

[0049] FIG. 1 shows that monovalent V_{H}, did not increase reporter gene activity and thus do not have agonistic CD137 activity in this assay. A—CD137 Reporter assay activity in the presence of PD1 expressing cells and CD137-PD-1 bispecific V_{H}-V_{H} molecule. Bispecific molecules activated the Jurkat reporter cells in the presence of PD-1 expressing cells. B—However, when co-cultured parental (non-PD-1) expressing cells, there was no activation of the Jurkat reporter cells.

[0050] FIG. 2 CD137 Reporter assay activity in the presence of PSMA expressing cells and CD137-PSMA bispecific V_{H}-V_{H} molecule. Bispecific molecules activated the Jurkat reporter cells in the presence of PSMA expressing cells.

[0051] FIG. 3 shows that antagonistic activity of a PD1 mAb in a PD1/PDL1 reporter assay was not impacted by the presence of the bispecific CD137-PD1 V_{H}-V_{H} molecule.

[0052] FIG. 4 Induction of IL-2 production by PBMCs following stimulation by SEB in the presence of TPP-972 and TPP-983. A—shows the response in donor cells CB149; B—shows the response in donor cells CB122.

[0053] FIG. 5 shows the binding of a panel of bispecific CD137-PD1 Humabody® V_{H} to (FIG. 5A) a CHO-PD1 cell line and (FIG. 5)—a CHO-CD137 cell line

[0054] FIG. 6 shows that the binding of a panel of CD137-PD1 bispecific Humabody® V_{H} is unaffected by the presence of Pembrolizumab. This demonstrates that they do not compete for the same epitope on PD1.

[0055] FIG. 7 NanoBiT® Cell based Protein Interaction Assay demonstrating that a panel of CD137-PD1 bispecific Humabody® V_{H} can bind both PD-1 and CD137 receptors simultaneously on the same cell. Traces are representative of n=2 similar experiments except for TPP-1410 for which n=1.

[0056] FIG. 8 Binding of labelled bispecific CD137-PD1 Humabody® V_{H}, TPP-1246 and TPP-1290 to Human CD8+ T cells. TPP-827 is a negative control Humabody® V_{H}.

[0057] FIG. 9 A Activity of a panel of CD137-PD1 bispecific Humabody® V_{H} in the CD137 Jurkat Reporter assay in the presence of CHO-PD1 cells. B Comparison of functional activity between CD137-PD1 bispecific Humabody® V_{H} containing either 4V_{H} (TPP-1438 & TPP-1439) comprising 2×PD1 V_{H} or 3V_{H} (TPP-1246 & TPP-1290) comprising 1×PD1 V_{H} in the CD137 Jurkat Reporter assay in the presence of CHO-PD1 cells.

[0058] FIG. 10 Enhancement of IL-2 production in Human CD8+ T cells when co-cultured with PD-1 expressing cells in the presence of plate bound anti CD3 antibody. CD137-PD1 bispecific Humabody® V_{H} (TPP-1246, 1290 and 1293) and Urelumab analog were compared to monovalent control Humabody® V_{H} (TPP-447, 1224 and 996). Representative graph showing a single donor.

[0059] FIG. 11 Induction of IFN-γ release from anti-CD3 stimulated PBMCs by CD137-PD1 bispecific Humabody® V_{H} and Urelumab analog. TPP-827 and IgG4 are Humabody® V_{H} and IgG negative controls respectively. Error bars represent the standard deviation of two measurements from the same donor.

[0060] FIG. 12 CD137-PD-1 bispecific Humabody® V_{H} induce IL-2 production in repetitively stimulated human T cells in a functional co-culture assay with autologous DC in the presence of SEB.

[0061] FIGS. 13 A and B. CD137×PD-1 Humabody® V_{H} downregulate PD-1 expression and increase CD137 expression in human repetitively stimulated CD8+(13A) and CD4+(13B) T cells in a functional co-culture assay with autologous DC in the presence of SEB. The decrease in % positive cells detected with Pembrolizumab analog for PD1+ cells and Urelumab analog for CD137+ cells is due to epitope competition with the detection antibodies. Pembrolizumab and Urelumab analogs were therefore used for gating only in the PD1+ and CD137+ populations, respectively.

[0062] FIGS. 14 A and B showing the downregulation of PD-1 expression by CD137-PD-1 bispecific Humabody® V_{H} in a dose-dependent manner on CD8+(FIG. 14A) and CD8− cells (FIG. 14B).

[0063] FIG. 15 CD137-PD1 bispecific Humabody V_{H}, TPP-1246 and TPP-1290 stimulate a dose dependent increase in IFNγ secretion compared to negative control Humabody® V_{H} TPP-827 in Exhausted T-cells.

[0064] FIG. 16 Serum levels after a single i.v. administration of TPP-1246 at 3 mg/kg in cynomolgus macaque.

### DETAILED DESCRIPTION OF THE EMBODIMENTS

[0065] The embodiments of the invention will now be further described. In the following passages, different embodiments are described. Each aspect so defined may be combined with any other aspect or aspects unless clearly indicated to the contrary. In particular, any feature indicated as being preferred or advantageous may be combined with any other feature or features indicated as being preferred or advantageous.

[0066] Generally, nomenclatures used in connection with, and techniques of, cell and tissue culture, pathology, oncology, molecular biology, immunology, microbiology, genetics and protein and nucleic acid chemistry and hybridization described herein are those well-known and commonly used in the art. The methods and techniques of the present disclosure are generally performed according to conventional methods well-known in the art and as described in various general and more specific references that are cited and discussed throughout the present specification unless otherwise indicated. See, e.g., Green and Sambrook et al., Molecular Cloning: A Laboratory Manual, 4th ed., Cold Spring Harbor Laboratory Press, Cold Spring Harbor, N.Y. (2012); Therapeutic Monoclonal Antibodies: From Bench to Clinic, Zhiqiang An (Editor), Wiley, (2009); and Antibody Engineering, 2nd Ed., Vols 1 and 2, Ontermann and Dubel, eds., Springer-Verlag, Heidelberg (2010).

[0067] Enzymatic reactions and purification techniques are performed according to manufacturer's specifications, as commonly accomplished in the art or as described herein. The nomenclatures used in connection with, and the laboratory procedures and techniques of, analytical chemistry, synthetic organic chemistry, and medicinal and pharmaceutical chemistry described herein are those well-known and commonly used in the art. Standard techniques are used for chemical syntheses, chemical analyses, pharmaceutical preparation, formulation, and delivery, and treatment of patients. Suitable assays to measure the properties as set out above are also described in the examples.

[0068] The term “antibody” as used herein broadly refers to any immunoglobulin (Ig) molecule, or antigen binding portion thereof, comprised of four polypeptide chains, two heavy (H) chains and two light (L) chains, or any functional fragment, mutant, variant, or derivation thereof, which retains the essential epitope binding features of an Ig molecule. Also encompassed are scaffolds.

[0069] In a full-length antibody, each heavy chain is comprised of a heavy chain variable region or domain (abbreviated herein as HCVR) and a heavy chain constant region. The heavy chain constant region is comprised of three domains, C_{H}1, C_{H}2 and C_{H}3. Each light chain has a light chain variable region or domain (abbreviated herein as LCVR) and a light chain constant region. The light chain constant region is comprised of one domain, CL.

[0070] The heavy chain and light chain variable regions can be further subdivided into regions of hypervariability, termed complementarity determining regions (CDR), interspersed with regions that are more conserved, termed framework regions (FR). Each heavy chain and light chain variable region is composed of three CDRs and four FRs, arranged from amino-terminus to carboxy-terminus in the following order: FR1, CDR1, FR2, CDR2, FR3, CDR3, FR4.

[0071] Immunoglobulin molecules can be of any type (e.g., IgG, IgE, IgM, IgD, IgA and IgY), class (e.g., IgG 1, IgG2, IgG 3, IgG4, IgA1 and IgA2) or subclass.

[0072] The term “CDR” refers to the complementarity-determining region within antibody variable sequences. There are three CDRs in each of the variable regions of the heavy chain and the light chain, which are designated CDR1, CDR2 and CDR3, for each of the variable regions. The term “CDR set” refers to a group of three CDRs that occur in a single variable region capable of binding the antigen. The exact boundaries of these CDRs can be defined differently according to different systems known in the art.

[0073] The Kabat Complementarity Determining Regions (CDRs) are based on sequence variability and are the most commonly used (Kabat et al., (1971) Ann. NY Acad. Sci. 190:382-391 and Kabat, et al., (1991) Sequences of Proteins of Immunological Interest, Fifth Edition, U.S. Department of Health and Human Services, NIH Publication No. 91-3242). Chothia refers instead to the location of the structural loops (Chothia and Lesk J. Mol. Biol. 196:901-917 (1987)). The Kabat numbering system is generally used when referring to a residue in the variable domain (approximately residues 1-107 of the light chain and residues 1-113 of the heavy chain). Another system is the ImMunoGeneTics (IMGT) numbering scheme. The IMGT numbering scheme is described in Lefranc et al., Dev. Comp. Immunol., 29, 185-203 (2005).

[0074] The system described by Kabat is used herein. The terms “Kabat numbering”, “Kabat definitions” and “Kabat labeling” are used interchangeably herein. These terms, which are recognized in the art, refer to a system of numbering amino acid residues which are more variable (i.e., hypervariable) than other amino acid residues in the heavy and light chain variable regions of an antibody, or an antigen binding portion.

[0075] A chimeric antibody is a recombinant protein that contains the variable domains including the complementarity determining regions (CDRs) of an antibody derived from one species, preferably a rodent antibody, while the constant domains of the antibody molecule are derived from those of a human antibody.

[0076] A humanized antibody is a recombinant protein in which the CDRs from an antibody from one species; e.g., a rodent antibody, are transferred from the heavy and light variable chains of the rodent antibody into human heavy and light variable domains (e.g., framework region sequences). The constant domains of the antibody molecule are derived from those of a human antibody. In certain embodiments, a limited number of framework region amino acid residues from the parent (rodent) antibody may be substituted into the human antibody framework region sequences.

[0077] The term “antigen binding site” refers to the part of the antibody or antibody fragment that comprises the area that specifically binds to an antigen. An antigen binding site may be provided by one or more antibody variable domains. An antigen binding site is typically comprised within the associated V_{H} and V_{L} of an antibody or antibody fragment.

[0078] An antibody fragment is a portion of an antibody, for example as F(ab′)2, Fab, Fv, scFv, heavy chain, light chain, heavy (V_{H}), variable light (V_{L}) chain domain and the like. Functional fragments of a full length antibody retain the target specificity of a full antibody. Recombinant functional antibody fragments, such as Fab (Fragment, antibody), scFv (single chain variable chain fragments) and single domain antibodies (dAbs) have therefore been used to develop therapeutics as an alternative to therapeutics based on mAbs. scFv fragments (˜25 kDa) consist of the two variable domains, V_{H} and V_{L}. Naturally, V_{H} and V_{L} domain are non-covalently associated via hydrophobic interaction and tend to dissociate. However, stable fragments can be engineered by linking the domains with a hydrophilic flexible linker to create a single chain Fv (scFv).

[0079] The smallest antigen binding fragment is the single variable fragment, namely the single variable heavy (V_{H}) or single variable light (V_{L}) chain domain. V_{H} and V_{L} domains respectively are capable of binding to an antigen. Binding to a light chain/heavy chain partner respectively or indeed the presence of other parts of the full antibody is not required for target binding. The antigen-binding entity of an antibody, reduced in size to one single domain (corresponding to the V_{H} or V_{L} domain), is generally referred to as a “single domain antibody” or “single immunoglobulin variable domain”. A single domain antibody (˜12 to 15 kDa) thus consists of either the V_{H} or V_{L} domain, but it does not comprise other parts of a full length antibody. Single domain antibodies derived from camelid heavy chain only antibodies that are naturally devoid of light chains as well as single domain antibodies that have a human heavy chain domain have been described (Muyldermans 2001, Holliger 2005). Antigen binding single V_{H} domains have also been identified from, for example, a library of murine V_{H} genes amplified from genomic DNA from the spleens of immunized mice and expressed in E. coli (Ward et al., 1989, Nature 341: 544-546). Ward et al. named the isolated single V_{H} domains “dAbs” for “domain antibodies.” The term “dAb” or “sdAb” generally refers to a single immunoglobulin variable domain (V_{H}, V_{HH} or V_{L}) polypeptide that specifically binds antigen. Such a molecule only has the V_{H} or V_{L} binding domain respectively, but does not comprise other parts of a full length antibody. Unless otherwise specified, as used herein, the term refers to a single domain antibody that has a V_{H} domain. For use in therapy, human single domain antibodies are preferred, primarily because they are not as likely to provoke an immune response when administered to a patient.

[0080] The terms “single domain antibody”, “V_{H} domain antibody”, “single V_{H} domain antibody”, “V_{H} single domain antibody”, “single variable domain”, “single variable domain antibody”, “single variable heavy chain domain antibody” or immunoglobulin single variable domain (ISV)” are thus all well known in the art and describe the single variable fragment of an antibody that binds to a target antigen. These terms are used interchangeably herein. These terms above and specifically “single heavy chain domain antibody”, “single variable heavy chain domain antibody” “single V_{H} domain antibody”, “ISV”, and “V_{H} single domain” as used herein describe a part of an antibody, i.e. the single heavy chain variable fragment of an antibody, e.g. the V_{H} domain, which retains binding specificity to the antigen in the absence of light chain or other antibody fragments. Such a molecule, e.g. a single variable heavy chain domain antibody is capable of binding to an antigen in the absence of light chain. A single variable heavy chain domain antibody does not comprise other parts of a full length antibody; it only includes the V_{H} domain. Thus, as used herein, these terms and specifically a single domain antibody, specify a binding moiety that is solely made up of the V_{H} domain and does not have other parts of an antibody. As explained herein, the CD137 binding entity illustrated below is a V_{H} single domain antibody and in preferred embodiments, the PD-1 binding entity is also a V_{H} single domain antibody.

[0081] As explained below, the embodiments relate to isolated binding molecules which comprise or consist of a single variable heavy chain domain antibody/immunoglobulin single variable heavy chain domain which bind a CD137 antigen and also comprise a moiety that binds to PD-1. Thus, the single variable heavy chain domain antibody (i.e. a V_{H} domain) is capable of binding to CD137 in the absence of light chain. Human single variable heavy chain domain antibodies (“V_{H} domain antibody”) are particularly preferred. Such binding molecules are also termed Humabody® herein. Humabody® is a registered trademark of Crescendo Biologics Ltd.

[0082] The term “isolated” refers to a moiety that is isolated from its natural environment. For example, the term “isolated” refers to a single domain antibody or binding molecule that is substantially free of other single domain antibodies or binding molecule, antibodies or antibody fragments. Moreover, an isolated single domain antibody may be substantially free of other cellular material and/or chemicals.

[0083] Each V_{H} domain antibody comprises three CDRs and four FRs, arranged from amino-terminus to carboxy-terminus in the following order: FR1-CDR1-FR2-CDR2-FR3-CDR3-FR4. Thus, in one embodiment of the invention, the domain is a human variable heavy chain (V_{H}) domain with the following formula FR1-CDR1-FR2-CDR2-FR3-CDR3-FR4.

[0084] Modifications to the C or N-terminal V_{H} framework sequence may be made to the single domain antibodies of the invention to improve their properties. For example, the V_{H} domain may comprise C or N-terminal extensions. C-terminal extensions can be added to the C-terminal end of a V_{H} domain which terminates with the residues VTVSS (SEQ ID NO: 1881).

[0085] In one embodiment, the single domain antibodies used in the invention/the binding molecules of the invention comprise C-terminal extensions of from 1 to 50 residues, for example 1 to 10, e.g. 1, 2, 3, 4, 5, 6, 7, 8, 9 or 10, 1-20, 1-30 or 1-40 additional amino acids. In one embodiment, the single domain antibodies of the invention comprise additional amino acids of the human C_{H}1 domain thus that the C terminal end extends into the C_{H}1 domain. For example, C-terminal extensions may comprise neutral, nonpolar amino acids, such as A, L, V, P, M, G, I, F or W or neutral polar amino acids, such as S or T. C-terminal extensions may also be selected from peptide linkers or tags. Additional C or N-terminal residues can be peptide linkers that are for example used to conjugate the single domain antibodies of the invention to another moiety, or tags that aid the detection of the molecule. Such tags are well known in the art and include for, example, linker His tags, e.g., hexa-His ((SEQ ID NO: 1866) or myc tags.

[0086] As used herein, the term “homology” or “identity” as used herein generally refers to the percentage of amino acid residues in a sequence that are identical with the residues of the reference polypeptide with which it is compared, after aligning the sequences and in some embodiments after introducing gaps, if necessary, to achieve the maximum percentage homology, and not considering any conservative substitutions as part of the sequence identity. “Homology” or “identity” are used interchangeably herein. Thus, the percentage homology between two amino acid sequences is equivalent to the percentage identity between the two sequences and where the term sequence percentage homology is used, this can be replaced with sequence percentage identity. Neither N- or C-terminal extensions, tags or insertions shall be construed as reducing identity or homology. Methods and computer programs for the alignment are well known. The percentage identity between two amino acid sequences can be determined using well known mathematical algorithms.

[0087] According to some embodiments of the various aspects of the invention, the variable domain of the single domain antibodies as described herein is a human variable domain (as used herein V_{H} refers to a human domain), a camelid variable domain (V_{HH}), a humanised V_{HH} domain, a camelized V_{H} domain, a sequence modified V_{H} or V_{HH} domain. In one embodiment, the variable domain of the single domain antibodies as described herein is a V_{H} domain.

[0088] As used herein, a human V_{H} domain includes a fully human or substantially fully human V_{H} domain. As used herein, the term human V_{H} domain also includes V_{H} domains that are isolated from heavy chain only antibodies made by transgenic mice expressing fully human immunoglobulin heavy chain loci, in particular in response to an immunisation with an antigen of interest, for example as described in WO2016/062990 incorporated herein by reference and in the examples below. In one embodiment, a human V_{H} domain can also include a V_{H} domain that is derived from or based on a human V_{H} domain amino acid or produced from a human V_{H} nucleic acid sequence. Thus, the term human V_{H} domain includes variable heavy chain regions derived from or encoded by human germline immunoglobulin sequences and for example obtained from heavy chain only antibodies produced in transgenic mice expressing fully human V_{H} genes. In some embodiments, a substantially human V_{H} domain or V_{H} domain that is derived from or based on a human V_{H} domain may include amino acid residues not encoded by human germline immunoglobulin sequences (e.g., mutations introduced in vitro, e.g. by random or site-specific mutagenesis, or introduced by somatic mutation in vivo). The term “human V_{H} domain” therefore also includes a substantially human V_{H} domain, i.e. human V_{H} domain wherein one or more amino acid residue has been modified, for example to remove sequence liabilities. For example, a substantially human V_{H} domain the V_{H} domain may include up to 10, for example 1, 2, 3, 4, 5, 6, 7, 8, 9 or 10 or up to 20 amino acid modifications compared to a germline human sequence.

[0089] However, the term “human V_{H} domain” or “substantially human V_{H} domain”, as used herein, is not intended to include antibodies in which CDR sequences derived from the germline of another mammalian species, such as a mouse, have been grafted onto human framework sequences. In one embodiment, the term “human V_{H} domain”, as used herein, is also not intended to include camelized V_{H} domains, that is human V_{H} domains that have been specifically modified, for example in vitro by conventional mutagenesis methods to select predetermined positions in the V_{H} domains sequence and introduce one or more point mutation at the predetermined position to change one or more predetermined residue to a specific residue that can be found in a camelid V_{HH} domain.

[0090] The term “KD” refers to the “equilibrium dissociation constant” and refers to the value obtained in a titration measurement at equilibrium, or by dividing the dissociation rate constant (Koff) by the association rate constant (Kon). “KA” refers to the affinity constant. The association rate constant, the dissociation rate constant and the equilibrium dissociation constant are used to represent the binding affinity of an antibody to an antigen. Methods for determining association and dissociation rate constants are well known in the art. Using fluorescence-based techniques offers high sensitivity and the ability to examine samples in physiological buffers at equilibrium. Other experimental approaches and instruments such as a BIAcore® assay can be used.

[0091] The term “specific binding” or “specifically binds to” or is “specific for” a particular polypeptide or an epitope on a particular polypeptide target as used in this disclosure can be exhibited, for example, by a molecule having a KD for the target of at least about 10-6 M, alternatively at least about 10-7 M, alternatively at least about 10-8 M, alternatively at least about 10-9 M, alternatively at least about 10-10 M, alternatively at least about 10-11 M, alternatively at least about 10-12 M, or greater affinity. In one embodiment, the term “specific binding” refers to binding where a molecule binds to a particular polypeptide or epitope on a particular polypeptide without substantially binding to any other polypeptide or polypeptide epitope.

[0092] In some embodiments, there is provided binding molecule that comprises a V_{H} single domain antibody that is a variant of any of the single V_{H} domain antibodies described herein having one or more amino acid substitutions, deletions, insertions or other modifications, and which retains a biological function of the single domain antibody. Thus, variant V_{H} single domain antibody can be sequence engineered. Modifications may include one or more substitution, deletion or insertion of one or more codons encoding the single domain antibody or polypeptide that results in a change in the amino acid sequence as compared with the native sequence V_{H} single domain antibody or polypeptide. Amino acid substitutions can be the result of replacing one amino acid with another amino acid having similar structural and/or chemical properties, such as the replacement of a leucine with a serine, i.e., conservative amino acid replacements. Insertions or deletions may optionally be in the range of about 1 to 25, for example 1 to 5, 1 to 10, 1 to 15 or 1 to 20 amino acids, for example 1, 2, 3, 4, 5, 6, 7, 8, 9 or 10 amino acids. The variation allowed may be determined by systematically making insertions, deletions or substitutions of amino acids in the sequence and testing the resulting variants for activity exhibited by the full-length or mature native sequence. A variant of a V_{H} single domain antibody described herein has at least 50%, for example at least 70%, 71%, 72%, 73%, 74%, 75%, 76%, 77%, 78%, 79%, 80%, 81%, 82%, 83%, 84%, 85%, 86%, 87%, 88%, 89%, 90%, 91%, 92%, 93%, 94%, 95%, 96%, 97%, 98% or 99% sequence homology to the non-variant molecule, preferably at least 90%, 91%, 92%, 93%, 94%, 95%, 96%, 97%, 98% or 99% sequence homology.

[0093] In one embodiment, the modification is a conservative sequence modification. As used herein, the term “conservative sequence modifications” is intended to refer to amino acid modifications that do not significantly affect or alter the binding characteristics of the antibody containing the amino acid sequence. Such conservative modifications include amino acid substitutions, additions and deletions. Modifications can be introduced into an sdAb of the invention by standard techniques known in the art, such as site-directed mutagenesis and PCR-mediated mutagenesis. Conservative amino acid substitutions are ones in which the amino acid residue is replaced with an amino acid residue having a similar side chain. Families of amino acid residues having similar side chains have been defined in the art. These families include amino acids with basic side chains (e.g., lysine, arginine, histidine), acidic side chains (e.g., aspartic acid, glutamic acid), uncharged polar side chains (e.g., glycine, asparagine, glutamine, serine, threonine, tyrosine, cysteine, tryptophan), nonpolar side chains (e.g., alanine, valine, leucine, isoleucine, proline, phenylalanine, methionine), beta-branched side chains (e.g., threonine, valine, isoleucine) and aromatic side chains (e.g., tyrosine, phenylalanine, tryptophan, histidine). Thus, one or more amino acid residues within the CDR regions of a single domain antibody of the invention can be replaced with other amino acid residues from the same side chain family and the altered antibody can be tested for retained function (i.e., CD137 binding) using the functional assays described herein.

[0094] Thus, these amino acid changes can typically be made without altering the biological activity, function, or other desired property of the polypeptide, such as its affinity or its specificity for antigen. In some instances these changes are made to improve the affinity of the antibody, e.g., single V_{H} domain antibody, for its target antigen. In general, single amino acid substitutions in nonessential regions of a polypeptide do not substantially alter biological activity. Furthermore, substitutions of amino acids that are similar in structure or function are less likely to disrupt the polypeptides' biological activity. Abbreviations for the amino acid residues that comprise polypeptides and peptides described herein, and conservative substitutions for these amino acid residues are shown in Table 1 below.

TABLE 1
Amino Acid Residues and Examples of
Conservative Amino Acid Substitutions

| Original residue | |
|---|---|
| Three letter code, | Conservative |
| single letter code | substitution |
| Alanine, Ala, A | Gly, Ser |
| Arginine, Arg, R | Lys, His |
| Asparagine, Asn, N | Gln, His |
| Aspartic acid Asp, D | Glu, Asn |
| Cysteine, Cys, C | Ser, Ala |
| Glutamine, Gln, Q | Asn |
| Glutamic acid, Glu, E | Asp, Gln |
| Glycine, Gly, G | Ala |
| Histidein, His, H | Asn, Gln |
| Isoleucine, Ile, I | Leu, Val |
| Leucine, Leu, L | Ile, Val |
| Lysine, lys, K | Ar, His |
| Methionine, Met, M | Leu, Ile, Tyr |
| Phenylalanine, Phe, F | Tyr, Met, Leu |
| Proline, Pro, P | Ala |
| Serine, Ser, S | Thr |
| Threonine, Thr, T | Ser |
| Tryptophan, Trp, W | Tyr, Phe |
| Tyrosine, Tyr, Y | Try, Phe |
| Valine, Val, V | Ile, Leu |

[0095] In some embodiments, the binding molecule includes a V_{H} single domain antibody that binds to CD137 and is a variant of a single domain antibody selected from those shown in Tables 2, 3 and 4 and 7 or that binds to PD-1 as shown in tables 8, 9 or 10 or 11 that comprises one or more sequence modification and has improvements in one or more of a property such as binding affinity, specificity, thermostability, expression level, effector function, glycosylation, reduced immunogenicity, or solubility as compared to the unmodified single domain antibody.

[0096] A skilled person will know that there are different ways to identify, obtain and optimise the antigen binding molecules as described herein, including in vitro and in vivo expression libraries. This is further described in the examples. Optimisation techniques known in the art, such as display (e.g., ribosome and/or phage display) and/or mutagenesis (e.g., error-prone mutagenesis) can be used. The invention therefore also comprises sequence optimised variants of the single domain antibodies described herein.

[0097] In one embodiment, modifications can be made to decrease the immunogenicity of the single domain antibody. For example, one approach is to revert one or more framework residues to the corresponding human germline sequence. More specifically, a single domain antibody that has undergone somatic mutation may contain framework residues that differ from the germline sequence from which the single domain antibody is derived. Such residues can be identified by comparing the single domain antibody framework sequences to the germline sequences from which the single domain antibody is derived. In one embodiment, all framework residues are germline sequence.

[0098] To return one or more of the amino acid residues in the framework region sequences to their germline configuration, the somatic mutations can be “backmutated” to the germline sequence by, for example, site-directed mutagenesis or PCR-mediated mutagenesis.

[0099] Another type of framework modification involves mutating one or more residues within the framework region, or even within one or more CDR regions, to remove T cell epitopes to thereby reduce the potential immunogenicity of the antibody.

[0100] In still another embodiment, the glycosylation is modified. For example, an aglycoslated antibody can be made (i.e., the antibody lacks glycosylation). Glycosylation can be altered to, for example, increase the affinity of the antibody for antigen. Such carbohydrate modifications can be accomplished by, for example, altering one or more sites of glycosylation within the antibody sequence. For example, one or more amino acid substitutions can be made that result in elimination of one or more variable region framework glycosylation sites to thereby eliminate glycosylation at that site. Such aglycosylation may increase the affinity of the antibody for the antigen.

[0101] In one embodiment, the one or more substitution is in the CDR1, 2 or 3 region. For example, there may be 1, 2, 3, 4 or 5 amino acid substitutions in the CDR1, 2 or 3. In another example, there may be 1 or 2 amino acid deletions. In one embodiment, the one or more substitution is in the framework region. For example, there may be 1 to 10 or more amino acid substitutions in the CDR1, 2 or 3. In another example, there may be 1 to 10 or more amino acid deletions.

[0102] The term “epitope” or “antigenic determinant” refers to a site on the surface of an antigen (e.g., PD-1 or CD137) to which an immunoglobulin, antibody or antibody fragment, including a V_{H} single domain antibody specifically binds. Generally, an antigen has several or many different epitopes and reacts with many different antibodies. The term specifically includes linear epitopes and conformational epitopes. Epitopes within protein antigens can be formed both from contiguous amino acids (usually a linear epitope) or non-contiguous amino acids juxtaposed by tertiary folding of the protein (usually a conformational epitope). Epitopes formed from contiguous amino acids are typically, but not always, retained on exposure to denaturing solvents, whereas epitopes formed by tertiary folding are typically lost on treatment with denaturing solvents. An epitope typically includes at least 3, 4, 5, 6, 7, 8, 9, 10, 11, 12, 13, 14 or 15 amino acids in a unique spatial conformation. Methods for determining what epitopes are bound by a given antibody or antibody fragment (i.e., epitope mapping) are well known in the art and include, for example, immunoblotting and immunoprecipitation assays, wherein overlapping or contiguous peptides from are tested for reactivity with a given antibody or antibody fragment. An antibody binds “essentially the same epitope” as a reference antibody, when the two antibodies recognize identical or sterically overlapping epitopes. The most widely used and rapid methods for determining whether two epitopes bind to identical or sterically overlapping epitopes are competition assays, which can be configured in different formats, using either labelled antigen or labelled antibody.

[0103] The inventors have surprisingly identified single variable heavy chain domain antibodies that, when targeted to CD137 in a monospecific format, that is without being linked to another moiety specific to a second antigen, bind specifically to CD137, but do not induce clustering of the CD137 receptor. Binding of the single variable heavy chain domain antibodies described herein in a monovalent or monospecific format does therefore not activate CD137 signalling and does not lead to CD137 signalling. Binding of the single variable heavy chain domain antibodies described herein does not agonise CD137 signalling unless they are provided together with another moiety specific to a second antigen, for example as a bispecific fusion protein wherein a single variable heavy chain domain antibody described herein is linked to another moiety that binds PD-1.

[0104] When a single variable heavy chain domain antibody as described herein is provided as part of a binding molecule, for example as a fusion protein together with a moiety that binds to PD-1, such as a single variable heavy chain domain antibody that binds to PD-1, binding to CD137 and PD-1 results in clustering of the CD137 receptor and CD137 signalling. Induction of CD137 signalling thus requires dual engagement of both targets, i.e. CD137 and PD-1. This enables CD137 activation on cells that express CD137 and PD-1 and/or on CD137 expressing cells in proximity to cells expressing PD-1. The binding molecules effectively engage CD137 on the surface of cells through mechanisms other than binding to Fc-receptors thus also avoiding unwanted toxicities, including liver toxicity. Simultaneously, they engage cells that express PD-1. The bispecific molecule targets CD137 to PD-1 positive cell and CD137 is thus activated at a localised site, not globally. The bispecific molecule can engage both targets in ‘trans’ on different cells but also in ‘cis; on the same cell.

[0105] In one embodiment, the PD-1 moiety is a molecule that binds to PD-1 and does not provide blocking of the PD-1 pathway. Such molecules can be used in combination with PD-1 Abs to achieve dual pathway modulation (PD-1 antagonism and CD137 agonism) and can be used together with another PD-1 therapy as further described herein.

[0106] When the single variable heavy chain domain antibody that binds to CD137 is combined, in a single molecule, with a moiety that binds PD-1 and blocks PD-1 signalling/function, this results in blockade of the PD-1 pathway. This enables PD-1 blockade preferentially on PD-1 CD137 double positive cells. This can result in an additive or synergistic effect on T-cell activation as a result of PD-1 blockade and CD137 agonism.

[0107] When the single variable heavy chain domain antibody that binds to CD137 is combined, in a single molecule, with a moiety that binds PD-1, but does not block PD-1 signalling/function when used in on its own, this results in blockade of the PD-1 pathway. This can result in an additive or synergistic effect on T-cell activation as a result of PD-1 blockade and CD137 agonism.

[0108] Advantages of targeting of both CD137 and PD-1 as described herein also include that targeting is to the activated tumour-infiltrating lymphocytes in the tumour microenvironment agnostic of tumour type. This would provide pan-tumour targeting compared to agonism through a tumour associated antigen. For these particular CD137 and PD-1 combinations which do not antagonise the PD-1/PDL1 interaction, there is also an advantage that it could be used in combination with existing therapeutic options (e.g. anti-PD1 mAbs) or directly following treatment if a patient is or becomes non-responsive without interference from a circulating PD-1 long half life Ab (PD-1 binding site will not be blocked by a PD-1 mAb with long-lived receptor occupancy).

[0109] We describe a binding molecule that binds to both CD137 and PD-1. The terms “binding molecule” and “binding agent” are used interchangeably herein. A binding molecule as used herein refers to a binding molecule that specifically binds at least two targets, i.e. CD137 and PD-1, wherein one subunit/entity/moiety that binds to CD137 is conjugated/linked a second subunit/entity/moiety that binds PD-1. As described herein, in some embodiments, the binding molecule is a fusion protein wherein one polypeptide that binds to CD137 is conjugated/linked to a second polypeptide that binds to PD-1.

[0110] In one aspect, the invention relates to an isolated multispecific binding molecule that binds to both CD137 and PD-1 and comprises a single variable heavy chain domain antibody that binds to CD137. In some embodiments, the single variable heavy chain domain antibody that binds to CD137 is as described herein.

[0111] The properties of the multispecific binding molecules of the invention can be exploited in therapeutic methods and uses as well as in pharmaceutical formulations as described herein.

[0112] In one aspect, the invention relates to an isolated binding molecule comprising or consisting of

a) a single variable heavy chain domain antibody that binds to CD137 and
b) a moiety that binds to PD-1 that binds to PD-1 but does not block PD-1 binding to its ligand.

[0113] In one aspect, the invention relates to an isolated binding molecule comprising or consisting of

a) a single variable heavy chain domain antibody that binds to CD137 and
b) a moiety that binds to PD-1 and blocks PD-1 binding to its ligand.

[0114] In one embodiment, as explained elsewhere, the single variable heavy chain domain antibody that binds to CD137 does not cause CD137 signalling when bound to CD137 as a monospecific entity. In one embodiment, the single variable heavy chain domain antibody binds to PD-1 binds PD-1, but does not block PD-1 function, for example binding to its ligand(s) when used in on its own. In one embodiment, the single variable heavy chain domain antibody binds to PD-1 and blocks PD-1 binding to its ligand(s).

[0115] Thus, the entity that binds to CD137 is not a full antibody that comprises light and heavy chains, but a single variable heavy chain domain, i.e. a single V_{H} domain antibody only. In some embodiments, the single variable heavy chain domain antibody that binds to CD137 is selected from one of the single variable heavy chain domain antibodies that bind to CD137 having a sequences as described herein as listed in the tables below (tables 2, 3 and 4) wherein the CDRs are defined according to Kabat.

[0116] The single variable heavy chain domain antibody that binds to CD137 and the moiety that binds to PD-1 are linked, for example by a peptide linker. For example, the single variable heavy chain domain antibody that binds to CD137 can be linked at its N or C terminus to the moiety that binds to PD-1.

[0117] The moiety that binds PD-1 can be selected from an antibody, antibody mimetic, antibody scaffold, antibody fragment or other polypeptide. An antibody fragment can be selected from a portion of an antibody, for example a F(ab′)2, Fab, Fv, scFv, heavy chain, light chain, heavy or variable light chain domain heavy or variable light chain domain, or part thereof, such as a CDR.

[0118] In one embodiment, the entity that binds PD-1 is a single variable heavy chain domain antibody that binds to PD-1, such as a human single V_{H} domain antibody. In some embodiments, the single variable heavy chain domain antibody that binds to PD-1 is selected from one of the single variable heavy chain domain antibodies that bind to PD-1 having a sequence as described herein and in the tables below.

[0119] In one embodiment, there is provided a binding molecule comprising or consisting of

a) a single variable heavy chain domain antibody that binds to CD137 and
b) a single variable heavy chain domain antibody that binds to PD-1, e.g. one that blocks or does not block PD-1 function.

[0120] Thus, preferably, the binding molecule comprises two single variable heavy chain domains, one that binds to CD137 and one that binds to PD-1 and optionally another moiety as described herein, such as a half life extending moiety. No other domains/chains of a full antibody; e.g. domains/chains of a full antibody that bind to CD137 and PD-1 respectively are present. In some embodiments, the single variable heavy chain domain antibody that binds CD137 and the single variable heavy chain domain antibody that binds PD-1 is a human V_{H} domain antibody.

[0121] In one aspect, we provide a binding molecule comprising a single human variable heavy chain domain antibody that binds to CD137, for example having a sequence as described herein (e.g. as set out in table 2, 3, 4 and 7), linked to another moiety that binds to PD-1 (e.g. as set out in table 8, 9 and 10 or in table 11), for example having a sequence as described herein wherein the binding molecule exhibits one or more of the following properties/is capable of:

(a) binds to human CD137 with a KD as measured in the examples;
(b) does not inhibit the interaction between PD-1 and its ligand, e.g. PDL-1 and/or PDL-2 or inhibits the interaction between PD-1 and its ligand;
(c) does not bind to mouse CD137;
(d) binds to cells expressing CD137 and simultaneously binds to cells expressing PD-1;
(e) stimulates IL-2 production from SEB activated PBMCs, for example as measured in the examples;
(f) binds simultaneously to CD137 and PD-1;
(g) binds to cyno CD137;
(h) has agonistic CD137 activity due to dual targeting, i.e. agonism is dependent on the presence of the second target;
i) has in vivo efficacy in a MC38 tumour model in C57BL/6-Pdcd1tm1(PDCD1)Tnfrsf9tm1(TNFRSF9) mice (Crown Bioscience Inc.);
j) downmodulates PD-1 on the cell surface; e.g. when a moiety that binds to PD-1 as e.g. as set out in table 8, 9 or and 10 is used;
k) induces IL-2 release from CD8+ T cells in a co-culture assay with PD-1 cells;
l) induces IFN-γ release from anti-CD3 stimulated PBMCs;
m) induces IL-2 release from PBMCs repetitively stimulated with anti-CD3 and anti-CD28 when co-cultured with autologous DCs in the presence of SEB;
n) induces IFN-γ release in a T cell exhaustion assay;
o) has extended half life in a PK study in genOway human HSA/FcRn Tg mice;
p) has extended half life in PK study in cynomolgus macaque;
q) binds to cells co-expressing CD137 and PD-1 to elicit T cell activation
r) enhances T cell activation and/or
s) blocks PD-1 function.

[0122] Surprisingly, the inventors have found that bispecific molecules described herein that comprise a V_{H} single domain antibody that binds to CD137 and a V_{H} single domain antibody that binds to PD-1, where the latter, which when used on its own does not block the PD-1 pathway (i.e. PD-1 function), are capable of downmodulating PD-1 on the cell surface. Without wishing to be bound by theory, this downmodulation may be due to downregulation of PD-1 surface expression, or internalisation and/or degradation of PD1, or cleavage of PD1, or downmodulation of PD-1 activity.

[0123] In one embodiment, the binding molecule exhibits more than 1 of the properties above, for example 1, 2, 3, 4, 5, 6, 7, 8, 9, 10, 11, 12, 13, 14, 15, 16, 17, 18, 19 or all of the properties selected from the above list, including any combination of properties. In one embodiment, the binding agent inhibits the interaction between human CD137 ligand and human CD137 expressed on the surface of cells.

[0124] In one embodiment, the binding molecule is a fusion protein comprising at least two subunits, i.e. a CD137-binding subunit fused to a PD-1-binding subunit wherein the CD137-binding subunit is a single variable heavy chain domain antibody that binds to CD137. In one embodiment, the binding molecule is a fusion protein comprising a single variable heavy chain domain antibody that binds to CD137 linked to a single variable heavy chain domain antibody that binds to PD-1. The linker is, for example, a peptide linker with GS residues such as (Gly4Ser)n, where n=from 1 to 50, e.g., 1 to 10, 10 to 20, 20 to 30, 30 to 40 or 40 to 50 as further described below.

[0125] The binding agent is multispecific, for example bispecific or trispecific. A bispecific molecule binds to 2 different targets. A trispecific molecule binds to 2 different targets. A monovalent molecule has one binding entity. A bivalent molecule has two binding entities which bind to the same or different target.

[0126] In one embodiment, the binding molecule comprises a first V_{H} single domain antibody that binds to CD137 (V_{H} (A)) and a second V_{H} single domain antibody (V_{H} (B)) that binds to PD-1 and thus has the following formula: V_{H} (A)-L-V_{H} (B). V_{H} (A) is conjugated to V_{H} (B), that is linked, for example with a peptide linker. L denotes a linker. Alternatively, the order may be V_{H} (B)-L-V_{H} (A).

[0127] Each V_{H} comprises CDR and FR regions. Thus, the binding molecule may have the following formula: FR1 (A)-CDR1 (A)-FR2(A)-CDR2(A)-FR3(A)-CDR3(A)-FR4(A)-L-FR1 (B)-CDR1 (B)-FR2(B)-CDR2(B)-FR3(B)-CDR3(B)-FR4(B). The order of the single V_{H} domains A and B is not particularly limited, so that, within a polypeptide of the invention, single variable domain A may be located N-terminally and single variable domain B may be located C-terminally, or vice versa.

[0128] The term “peptide linker” as used in the various embodiments described herein refers to a peptide comprising one or more amino acids. A peptide linker comprises 1 to 44 amino acids, more particularly 2 to 20 amino acids. Peptide linkers are known in the art or are described herein. Suitable, non-immunogenic linker peptides are, for example, linkers that include G and/or S residues, (G4S)n, (SG4)n or G4(SG4)n peptide linkers, wherein “n” is generally a number between 1 and 50, e.g., 1, 2, 3, 4, 5, 6, 7, 8, 9 or 10. In one embodiment, the peptide is for example selected from the group consisting of GGGGS (SEQ ID NO: 1867), GGGGSGGGGS (SEQ ID NO: 1868), SGGGGSGGGG (SEQ ID NO: 1869), GGGGSGGGGSGGGG (SEQ ID NO: 1870), GSGSGSGS (SEQ ID NO: 1871), GGSGSGSG (SEQ ID NO: 1872), GGSGSG (SEQ ID NO: 1873), or GGSG (SEQ ID NO: 1874).

[0129] In one embodiment, the fusion protein described above is capable of dual, e.g. simultaneous, engagement/binding to CD137 on the surface of effector cells and to PD-1. The dual, e.g. simultaneous binding leads to clustering of the CD137 receptor resulting in CD137 signalling.

[0130] In some embodiments, the fusion protein is capable of binding CD137 with an EC50 value that is similar to the EC50 value by which the monovalent single heavy chain domain antibody binds to CD137. In some embodiments, the fusion protein binds CD137 with an EC50 value as shown in the examples.

[0131] In some embodiments, the fusion protein may be capable of producing a synergistic effect through dual targeting of the CD137 expressing cell and the PD-1 antigen expressing cell.

[0132] In one embodiment, a binding molecule as described herein binds to CD137 with a KD of at least about 10-6 M, alternatively at least about 10-7 M, alternatively at least about 10-8 M, alternatively at least about 10-9 M, alternatively at least about 10-10 M, alternatively at least about 10-11 M, alternatively at least about 10-12 M, or greater affinity as measured according to the methods shown in the examples. In one embodiment, a binding molecule as described herein binds to PD-1 with a KD of at least about 10-6 M, alternatively at least about 10-7 M, alternatively at least about 10-8 M, alternatively at least about 10-9 M, alternatively at least about 10-10 M, alternatively at least about 10-11 M, alternatively at least about 10-12 M, or greater affinity as measured according to the methods shown in the examples. Binding can be measured as in the examples. In some embodiments, the binding molecules of the invention have IC50 and/or EC50 values as further described herein and as shown in the examples. Binding molecules described herein have shown excellent stability.

[0133] In another aspect, a nucleic acid molecule encoding a fusion protein described herein is provided. For example, the nucleic acid molecule comprises a nucleic acid encoding a single variable heavy chain domain antibody that binds to CD137 as specified herein and a nucleic acid encoding a single variable heavy chain domain antibody that binds to PD-1 as specified herein. A nucleic acid may comprise DNA or RNA and may be wholly or partially synthetic or recombinantly produced. Reference to a nucleotide sequence as set out herein encompasses a DNA molecule with the specified sequence, and encompasses a RNA molecule with the specified sequence in which U is substituted for T, unless context requires otherwise.

[0134] Furthermore, the invention relates to a nucleic acid construct comprising at least one nucleic acid as defined above. The construct may be in the form of a plasmid, vector, transcription or expression cassette.

[0135] The invention also relates to an isolated recombinant host cell comprising one or more nucleic acid construct as described above. The host cell may be a bacterial, viral, plant, mammalian or other suitable host cell. In one embodiment, the cell is an E. coli cell. In another embodiment, the cell is a yeast cell. In another embodiment, the cell is a Chinese Hamster Ovary (CHO) cell.

[0136] In one embodiment, a method of making the fusion protein as described herein is provided, wherein the method comprises culturing the host cell under conditions suitable for expression of the polynucleotide encoding the fusion protein, and isolating the single domain antibody.

[0137] Examples of multispecific molecules are provided herein, for example with reference to Table 12. Also provided below are examples of the CD137-binding subunit and the PD-1 binding subunit of the binding molecule which can each form part of the fusion protein.

### Exemplary Immunoglobulins Included in the Binding Molecule

[0138] As described above, the binding molecules comprise a single variable heavy chain domain antibody that binds CD137 (CD137-binding subunit) and a moiety that binds PD-1 (PD-1 binding subunit). For example, the binding molecule can be a fusion protein wherein a single variable heavy chain domain antibody that binds CD137 is linked to another polypeptide that binds to PD-1. The below provides examples of the CD137-binding subunit and the PD-1 binding subunit.

Exemplary Immunoglobulins Included in the Binding Molecule and which Bind CD137

[0139] Examples of single variable heavy chain domain antibodies that bind to CD137 and that may form one of the subunits of the binding molecule that bind to both, CD137 and PD-1, are described and can be used in the various embodiments of the invention.

[0140] CD137 is an important regulator of immune responses and therefore an important target in cancer therapy. The T cell costimulatory receptor CD137 is induced on activated T cells and plays a variety of crucial roles: preventing activation-induced cell death (AICD), promoting cell cycle progression, enhancing cytotoxicity and the production of type 1 cytokines such as IL-2, IFN-γ, and TNF-α, and increasing the memory CD8+ T cells. In vivo CD137 triggering with agonistic antibodies enhances CD8+ T cell responses against tumors. CD137 mediated anti-cancer effects are based on its ability to induce activation of cytotoxic T lymphocytes (CTL), and among others, high amounts of IFN-γ. CD137/CD137L interactions are also considered positive regulators of CD8+ T cell responses against viruses such as influenza virus, lymphocytic choriomeningitis virus (LCMV), and herpes simplex virus (HSV). CD137 is involved in sustaining the T cell responses after initial T-cell activation.

[0141] Importantly, CD137 signalling requires clustering of the CD137 receptor. Such clustering is mediated by the interaction of the trimeric CD137 ligand with the CD137 receptor resulting in recruitment of signalling molecules such as the TRAF family of proteins. This in turn leads to kinase modulation and activation of the Nf-KB signalling pathway. The NF-κB family of transcription factors has an essential role in inflammation and innate immunity. Furthermore, NF-κB is increasingly recognized as a crucial player in many steps of cancer initiation and progression.

[0142] Single domain antibodies described herein bind specifically to wild type human CD137 (UniProt Accession No. Q07011, GenBank Accession No. NM_001561). The amino acid sequence and nucleotide sequences for wild type human CD137 are shown in SEQ ID NO: 1875 and SEQ ID NO: 1876.

[0143] Unless otherwise specified, the term CD137 as used herein refers to human CD137. CD137 is also known as “4-1BB”, “TNF receptor superfamily member 9”, “TNFRS9”, “induced by lymphocyte activation” and “ILA” these terms are used interchangeably, and include variants, isoforms of human CD137.

[0144] The terms “CD137 binding molecule/protein/polypeptide/agent/moiety”, “CD137 antigen binding molecule molecule/protein/polypeptide/agent/moiety”, “anti-CD137 single domain antibody”, “anti-CD137 single immunoglobulin variable domain”, “anti-CD137 heavy chain only antibody” or “anti-CD137 antibody” all refer to a molecule capable of specifically binding to the human CD137 antigen. The binding reaction may be shown by standard methods, for example with reference to a negative control test using an antibody of unrelated specificity.

[0145] A multispecific binding agent described herein, “which binds” or is “capable of binding” an antigen of interest, e.g. human CD137, is one that binds the antigen with sufficient affinity such that the antibody is useful as a therapeutic agent in targeting a cell or tissue expressing the antigen CD137. Binding is to the extracellular domain of CD137.

[0146] Binding molecules of the invention bind specifically to human CD137. In other words, binding to the CD137 antigen is measurably different from a non-specific interaction. They do not cross react with mouse CD137.

[0147] In one embodiment, the sdAb binds to human CD137 and also binds to monkey (e.g., cynomolgous) CD137.

[0148] In one aspect, the monovalent single domain antibody used in the multispecific molecule exhibits one or more of the following properties as a monovalent entity (i.e. when it is not provided in a multispecific format together with an entity that binds to PD-1):

(a) binds to human CD137 with a KD as measured in the examples;
(b) binds to cells expressing CD137, but does not bind to cells that do not express CD137. This can be measured in a FMAT assay;
(c) shows minimal cell internalisation;
(d) inhibits the interaction between CD137 ligand and CD137 expressed on the surface of cells. This can be measured in a FMAT assay;
(e) does not activate CD137 signalling in T cells;
(f) does not stimulate IL-2 production from CD8+ cells;
(g) does not bind to mouse CD137;
(h) provides good stability and/or
(i) does not increase reporter gene activity and thus does not elicit CD137 signalling.

### Exemplary Sequence Features

[0149] In one aspect, the single variable heavy chain domain antibody comprises a CDR1, CDR2 or CDR3 as shown for one of the single domain antibodies as shown in Table 2, 3, 4 and 7 or having a CDR1, 2 or 3 with at least 75% homology thereto; or a set of CDRs (i.e. CDR1, CDR2, CDR3) wherein said set is as shown for one of the single domain antibodies as shown in Table 2, 3, 4 or 7 or where one or more of the CDRs in the set has at least 75% homology thereto.

[0150] Sequence homology with reference to CDR1, 2 or 3 sequences as above and as used generally herein can be at least 75%, 76%, 77%, 78%, 79%, 80%, 81%, 82%, 83%, 84%, 85%, 86%, 87%, 88%, 89%, 90%, 91%, 92%, 93%, 94%, 95%, 96%, 97%, 98% or 99% for example at least 90%, 91%, 92%, 93%, 94%, 95%, 96%, 97%, 98% or 99% sequence homology. In one example, sequence homology is at least 90%, or 95%. As mentioned elsewhere, homology and identity are used interchangeably herein and the above values also refer to sequence identity.

[0151] In another aspect, the single variable heavy chain domain antibody according to the invention comprises or consists of a full length sequence as shown in Table 2, 3, 4 and 7 or a sequence with at least 50% homology thereto. For example, the single variable heavy chain domain antibody has a full length sequence selected from the sequences listed in Table 2.

[0152] Sequence homology a full length sequence as above and as used generally herein can be at least 50%, 60%, 70%, 71%, 72%, 73%, 74%, 75%, 76%, 77%, 78%, 79%, 80%, 81%, 82%, 83%, 84%, 85%, 86%, 87%, 88%, 89%, 90%, 91%, 92%, 93%, 94%, 95%, 96%, 97%, 98% or 99% for example at least 90%, 91%, 92%, 93%, 94%, 95%, 96%, 97%, 98% or 99% sequence homology. In one example, sequence homology is at least 90%, or 95%.

[0153] In one embodiment, the single variable heavy chain domain antibody comprises a CDR1, 2, and 3 sequence as shown for V_{H} single domain antibodies CD137A, B, C or D or comprises or consists of a full length sequence as shown for V_{H} single domain antibodies CD137A, B, C or D (see table 2). In one embodiment, the single variable heavy chain domain antibody comprises a set of CDR1, 2, and 3 sequences as shown for V_{H} single domain antibodies CD137A, B, C or D as shown in table 2 or a sequence with at least 75%, 80%, 90% or 95% sequence homology thereto. Thus, in one embodiment, the V_{H} single domain antibody has a CDR1 with SEQ ID NO. 449 or a sequence with at least 75%, 80%, 90% or 95% sequence homology thereto, a CDR2 with SEQ ID NO. 450 or a sequence with at least 75%, 80%, 90% or 95% sequence homology thereto and a CDR3 with SEQ ID NO. 451 or a sequence with at least 75%, 80%, 90% or 95% sequence homology thereto. In another embodiment, the V_{H} single domain antibody has a CDR1 with SEQ ID NO. 850 or a sequence with at least 75%, 80%, 90% or 95% sequence homology thereto, a CDR2 with SEQ ID NO. 851 or a sequence with at least 75%, 80%, 90% or 95% sequence homology thereto and a CDR3 with SEQ ID NO. 852 or a sequence with at least 75%, 80%, 90% or 95% sequence homology thereto. In another embodiment, the V_{H} single domain antibody has a CDR1 with SEQ ID NO. 854 or a sequence with at least 75%, 80%, 90% or 95% sequence homology thereto, a CDR2 with SEQ ID NO. 855 or a sequence with at least 75%, 80%, 90% or 95% sequence homology thereto and a CDR3 with SEQ ID NO. 856 or a sequence with at least 75%, 80%, 90% or 95% sequence homology thereto. In another embodiment, the V_{H} single domain antibody has a CDR1 with SEQ ID NO. 878 or a sequence with at least 75%, 80%, 90% or 95% sequence homology thereto, a CDR2 with SEQ ID NO. 879 or a sequence with at least 75%, 80%, 90% or 95% sequence homology thereto and a CDR3 with SEQ ID NO. 880 or a sequence with at least 75%, 80%, 90% or 95% sequence homology thereto.

[0154] In one embodiment, the single variable heavy chain domain antibody is selected from one of the full length single variable heavy chain domain antibody CD137A, B, C or D as shown in table 2, or from a sequence with at least 75%, 80% or 90% or 95% homology thereto. In one embodiment, the single variable heavy chain domain antibody has a full length sequence as shown for A, B, C or D. Thus, in one embodiment, the V_{H} single domain antibody comprises a sequence selected from SEQ ID Nos: 452, 853, 857 or 881 or a sequence with at least 75%, 80% or 90% or 95% homology thereto.

[0155] In one embodiment, the single variable heavy chain domain antibody comprises a CDR1, 2, and 3 as shown for V_{H} single domain antibodies 1.1 to 1.114 or comprises or consists of a full length sequence as shown for V_{H} single domain antibodies 1.1 to 1.114 or a sequence with at least 75%, 80%, 90% or 95% homology thereto.

[0156] In one embodiment, the single variable heavy chain domain antibody comprises a CDR1, 2, and 3 as shown for V_{H} single domain antibodies V_{H} 1.107 to 1.114 as shown in table 3 or a sequence with at least 75%, 80%, 90% or 95% homology thereto. In one embodiment, the single variable heavy chain domain antibody comprises a set of CDR1, 2, and 3 sequences as shown for any one of V_{H} single domain antibodies 1.1 to 1.114 or a sequence with at least 75%, 80%, 90% or 95% sequence homology thereto. Thus, the V_{H} single domain antibody has a CDR1 with SEQ ID NO. 1 or a sequence with at least 75%, 80%, 90% or 95% sequence homology thereto, a CDR2 with SEQ ID NO. 2 or a sequence with at least 75%, 80%, 90% or 95% sequence homology thereto and a CDR3 with SEQ ID NO. 3 or a sequence with at least 75%, 80%, 90% or 95% sequence homology thereto; a CDR1 with SEQ ID NO. 5 or a sequence with at least 75%, 80%, 90% or 95% sequence homology thereto, a CDR2 with SEQ ID NO. 6 or a sequence with at least 75%, 80%, 90% or 95% sequence homology thereto and a CDR3 with SEQ ID NO. 7 or a sequence with at least 75%, 80%, 90% or 95% sequence homology thereto, a CDR1 with SEQ ID NO. 9 or a sequence with at least 75%, 80%, 90% or 95% sequence homology thereto, a CDR2 with SEQ ID NO. 10 or a sequence with at least 75%, 80%, 90% or 95% sequence homology thereto and a CDR3 with SEQ ID NO. 11 or a sequence with at least 75%, 80%, 90% or 95% sequence homology thereto and so forth.

[0157] In one embodiment, the single variable heavy chain domain antibody is selected from V_{H} 1.107 to 1.114 as shown in table 3, i.e. V_{H} 1.107, 1.108, 1.109, 1.110, 1.111, 1.112, 1.113 or 1.114, or a sequence with at least 75%, 80% 90% or 95% homology thereto. In one embodiment, the single variable heavy chain domain antibody is V_{H} 1.113 or a sequence with at least 75%, 80% 90% or 95% homology thereto. In one embodiment, the single variable heavy chain domain antibody is V_{H} 1.113 or a sequence with at least 75%, 80% 90% or 95% homology thereto.

[0158] In one embodiment, the single variable heavy chain domain antibody comprises CDR1, 2, and 3 sequence as shown for V_{H} single domain antibodies 2.1 to 2.51, e.g. 2.41 to 2.51 as shown in table 4 or comprises or consists of a full length sequence as shown for V_{H} single domain antibodies 2.1 to 2.51, e.g. 2.41 to 2.51. In one embodiment, the single variable heavy chain domain antibody comprises a CDR1, 2, and 3 as shown for V_{H} single domain antibodies as shown in table 4 or a sequence with at least 75%, 80% 90% or 95% homology thereto. In one embodiment, the single variable heavy chain domain antibody comprises a set of CDR1, 2, and 3 sequences as shown for any one of V_{H} single domain antibodies 2.1 to 2.51 or a sequence with at least 75%, 80%, 90% or 95% sequence homology thereto. Thus, the V_{H} single domain antibody has a CDR1 with SEQ ID NO. 457 or a sequence with at least 75%, 80%, 90% or 95% sequence homology thereto, a CDR2 with SEQ ID NO. 458 or a sequence with at least 75%, 80%, 90% or 95% sequence homology thereto and a CDR3 with SEQ ID NO. 459 or a sequence with at least 75%, 80%, 90% or 95% sequence homology thereto; a CDR1 with SEQ ID NO. 461, a CDR2 with SEQ ID NO. 462 or a sequence with at least 75%, 80%, 90% or 95% sequence homology thereto or a sequence with at least 75%, 80%, 90% or 95% sequence homology thereto and a CDR3 with SEQ ID NO. 463 or a sequence with at least 75%, 80%, 90% or 95% sequence homology thereto and so forth.

[0159] In one embodiment, the single variable heavy chain domain antibody is selected from those shown in table 4 or a sequence with at least 75%, 80% 90% or 95% homology thereto.

TABLE 2
Exemplary sequences for binding molecules that include two single variable heavy chain
domain antibodies, one that binds to CD137 and another that binds to PD-1: exemplary full
length sequences and CDR sequences of V_{H} single domain antibodies that bind to CD137.

| Name- | CDR1 | CDR2 | CDR3 | SEQ ID full VH |
|---|---|---|---|---|
| CD137 | NYWM | NINQDGSER | GGEGYGVDHYGL | EVQLVESGGGLVQPGGSLRLSCAASGFTLSNYWMNWVRQAP |
| A | N SEQ | YYVDSVKG | DV SEQ ID NO. | GKGLEWVANINQDGSERYYVDSVKGRFTISRDNAKNSLYLQMN |
| | ID NO. | SEQ ID NO. | 451 | SLRAEDTAVYYCARGGEGYGVDHYGLDVSGQGTTVTVSS |
| | 449 | 450 | | SEQ ID NO. 452 |
| CD137 | NYGM | VISNDGNTK | DETTTVTASYYFDY | EVQLVESGGGLVQPGGSLRLSCAASGFTFSNYGMWVRQAPG |
| B | H SEQ | TYADSVKG | SEQ ID NO. 852 | KGLEWVAVISNDGNTKTYADSVKGRFTISRDNSKNMLYLQMNS |
| | ID | SEQ ID NO. | | LRTEDTAVYYCAQDETTTVTASYYFDYWGQGTLVTVSS |
| | NO. 850 | 851 | | SEQ ID NO. 853 |
| CD137 | NYGM | VISNDGNTK | DETTTVTASYYFDY | EVQLVESGGGLVQPGGSLRLSCAASGFTFSNYGMHWVRQAPG |
| C | H SEQ | TYADSVKG | SEQ ID NO. 856 | KGLEWVAVISNDGNTKTYADSVKGRFTISRDNSKNTLYLQMNS |
| | ID NO. | SEQ ID NO. | | LRTEDTAVYYCAQDETTTVTASYYFDYWGQGTLVTVSS SEQ ID |
| | 854 | 855 | | NO. 857 |
| CD137 | NYGM | VISNDGNTK | DETTTVTASYYFDY | EVQLVESGGGVVQPGGSLRLSCAASGFTFSNYGMHWVRQAP |
| D | H SEQ | TYADSVKG | SEQ ID NO. 880 | GKGLEWVAVISNDGNTKTYADSVKGRFTISRDNSKNTLYLQMN |
| | ID NO. | SEQ ID NO. | | SLRAEDTAVYYCAQDETTTVTASYYFDYWGQGTLVTVSS SEQ |
| | 878 | 879 | | ID NO. 881 |

TABLE 3
Further exemplary sequences for binding molecules that include two single variable heavy chain
domain antibodies, one that binds to CD137 and another that binds to PD-1 - full length sequences and
CDR sequences of V_{H} single domain antibodies that bind to CD137 (Family 1) shown below

| Name | CDR1 | CDR2 | CDR3 | Full Length |
|---|---|---|---|---|
| 1.1 | SEQ ID NO: | SEQ ID NO: 2 | SEQ ID NO: 3 | SEQ ID NO: 4 |
| | 1 | HIKEDGSEKY | GGDGYSDSHF | EVQLVESGGGLVQPGGSLRLSCAASGFTFSSHWMTWFRQAPGKGLEW |
| | SHWMT | YEDSVEG | GVDV | VAHIKEDGSEKYYEDSVEGRFTVSRDNAKNSVYLQMNSLRAEDTAVYYC |
| | | | | ARGGDGYSDSHFGVDVWGQGTTVTVSS |
| 1.2 | SEQ ID NO: | SEQ ID NO: 6 | SEQ ID NO: 7 | SEQ ID NO: 8 |
| | 5 | HIKEDGSEKY | GGDGYSDSHY | EVQLVESGGGLVQPGGSLRLSCAASGFTFSSYWMTWFRQAPGKGLEW |
| | SYWMT | YVDSVEG | GVDV | VAHIKEDGSEKYYVDSVEGRFTISRDNANNSLYLQMNSLRAEDTAVYYC |
| | | | | ARGGDGYSDSHYGVDVWGQGTTVTVSS |
| 1.3 | SEQ ID NO: | SEQ ID NO: | SEQ ID NO: 11 | SEQ ID NO: 12 |
| | 9 | 10 | GGLGYGDSHY | EVQLVESGGGLVQPGGSLRLSCAASGFTFSSYWMTWFRQAPGRGLEW |
| | SYWMT | NINQDGSEK | GMDV | VANINQDGSEKYYVDSVEGRFTVSRDNAKNSLYLQMNSLRAEDTAVYYC |
| | | YYVDSVEG | | ARGGLGYGDSHYGMDVWGQGTTVTVSS |
| 1.4 | SEQ ID NO: | SEQ ID NO: | SEQ ID NO: 15 | SEQ ID NO: 16 |
| | 13 | 14 | GGLGYGDSHY | EVQLVESGGGLVQPGGSLRLSCAASGFTFSNYWMTWFRQAPGGGLE |
| | NYWMT | NINQDGSEK | GMDV | WVANINQDGSEKYYVDSVEGRFTVSRDNAKNSLYLQMNSLRAEDTAVY |
| | | YYVDSVEG | | YCARGGLGYGDSHYGMDVWGQGTTVTVSS |
| 1.5 | SEQ ID NO: | SEQ ID NO: | SEQ ID NO: 19 | SEQ ID NO: 20 |
| | 17 | 18 | GGDGYSGSHH | EVQLVESGGGLVQPGGSLRLSCAASGFTFSNYWMIWFRQAPGKGLEW |
| | NYWMI | NINQDGSEK | GTDV | VANINQDGSEKYYVDSVEGRFTISRDNAKNSLYLQMNSLRAEDTAVYYC |
| | | YYVDSVEG | | ARGGDGYSGSHHGTDVWGQGTTVTVSS |
| 1.6 | SEQ ID NO: | SEQ ID NO: | SEQ ID NO: 23 | SEQ ID NO: 24 |
| | 21 | 22 | GGEGYSTSHYG | EVQLVESGGGLVQPGGSLRLSCAASGFTFSSYWMSWVRQAPGKGLEW |
| | SYWMS | NIKQDGSEKY | MDV | VANIKQDGSEKYYVDSVKGRFTISRDNAKNSLYLQMNSLRAEDTAVYYC |
| | | YVDSVKG | | ARGGEGYSTSHYGMDVWGQGTTVTVSS |
| 1.7 | SEQ ID NO: | SEQ ID NO: | SEQ ID NO: 27 | SEQ ID NO: 28 |
| | 25 | 26 | GGDGYSDSHF | EVQLVESGGGLVQPGGSLRLSCGASGFTFSSYWMLWFRQAPGKGLEW |
| | SYWML | NINQDGSEK | GTDV | VANINQDGSEKYYVDSVKGRFTISRDNAKNSLYLQMNTLRAEDTAIYYC |
| | | YYVDSVKG | | ARGGDGYSDSHFGTDVWGQGTTVTVSS |
| 1.8 | SEQ ID NO: | SEQ ID NO: | SEQ ID NO: 31 | SEQ ID NO: 32 |
| | 29 | 30 | GGDGYSDSHY | EVQLVESGGGLVQPGGSLRLSCGASGFTFSSYWMFWFRQAPGEGLEW |
| | SYWMF | NINQDGSEK | GTDV | VANINQDGSEKYYVDSVEGRFTISRDNAKNSLYLQMNSLRAEDTAIYYCA |
| | | YYVDSVEG | | RGGDGYSDSHYGTDVWGQGTTVTVSS |
| 1.9 | SEQ ID NO: | SEQ ID NO: | SEQ ID NO: 35 | SEQ ID NO: 36 |
| | 33 | 34 | GGLGYGDSHY | EVQLVESGGGLVQPGGSLRLSCAASGFTFSNYWMTWFRQAPGGGLE |
| | NYWMT | NINQDGSEK | GMDV | WVANINQDGSEKYYVDSVEGRFTVSRDNAKNSLDLQMNSLRAEDTAVY |
| | | YYVDSVEG | | YCARGGLGYGDSHYGMDVWGQGTTVTVSS |
| 1.10 | SEQ ID NO: | SEQ ID NO: | SEQ ID NO: 39 | SEQ ID NO: 40 |
| | 37 | 38 | GGAGYSMSHY | EVQLVESGGGLVQPGGSLRLSCAASGFTFSDYWMNWARQAPGKGLE |
| | DYWMN | NIKEDGSEKY | GMDV | WVANIKEDGSEKYYVDSVEGRFTISRDNAKNSTYLQMNSLRVEDTAVYY |
| | | YVDSVEG | | CARGGAGYSMSHYGMDVWGQGTTVTVSS |
| 1.11 | SEQ ID NO: | SEQ ID NO: | SEQ ID NO: 43 | SEQ ID NO: 44 |
| | 41 | 42 | GGAGYSMSHY | EVQLVESGGGLVQPGGSLRLSCEASGFTFSDYWMNWARQAPGKGLE |
| | DYWMN | NIKEDGSEKY | GMDV | WVANIKEDGSEKYYVDSVEGRFTISRDNAKNSTYLQMNSLRAEDTAVYY |
| | | YVDSVEG | | CARGGAGYSMSHYGMDVWGQGTTVTVSS |
| 1.12 | SEQ ID NO: | SEQ ID NO: | SEQ ID NO: 47 | SEQ ID NO: 48 |
| | 45 | 46 | GGDGYSNSHF | EVQLVESGGGLVQPGGSLRLSCGASGFTFSSYWMLWFRQAPGKGLEW |
| | SYWML | NINQDGSEK | GTDV | VANINQDGSEKYYVDSVKGRFTISRDNAKNSLYLQMNTLRAEDTAIYYC |
| | | YYVDSVKG | | ARGGDGYSNSHFGTDVWGQGTTVTVSS |
| 1.13 | SEQ ID NO: | SEQ ID NO: | SEQ ID NO: 51 | SEQ ID NO: 52 |
| | 49 | 50 | GGDGYSDSHY | EVQLVESGGGLVKPGGSLRLSCGASGFTFSSYWMFWFRQAPGEGLEW |
| | SYWMF | NINQDGSEK | GTDV | VANINQDGSEKYYVDSVEGRFTISRDNAKNSLYLQMNSLRAEDTAIYYCA |
| | | YYVDSVEG | | RGGDGYSDSHYGTDVWGQGTTVTVSS |
| 1.14 | SEQ ID NO: | SEQ ID NO: | SEQ ID NO: 55 | SEQ ID NO: 56 |
| | 53 | 54 | GGEGYSTSHYG | EVQLVESGGGLVQPGGSLRLSCAASGFTFSNYWMNWVRQAPGKGLE |
| | NYWMN | NIKEDGSENY | MDV | WVANIKEDGSENYYVDSVKGRFTISRDNAKNSLYLQMNSLRAEDTAVYY |
| | | YVDSVKG | | CARGGEGYSTSHYGMDVWGQGTTVTVSS |
| 1.15 | SEQ ID NO: | SEQ ID NO: | SEQ ID NO: 59 | SEQ ID NO: 60 |
| | 57 | 58 | GGDGYSDSHF | EVQLVESGGGLVQPGGSLRLSCGASGFTFSTYWMLWFRQAPGKGLEW |
| | TYWML | NINQDGSEK | GTDV | VANINQDGSEKYYVDSVKGRFTISRDNAKNSLSLQMNSLRAEDTATYYC |
| | | YYVDSVKG | | ARGGDGYSDSHFGTDVWGQGTTVTVSS |
| 1.16 | SEQ ID NO: | SEQ ID NO: | SEQ ID NO: 63 | SEQ ID NO: 64 |
| | 61 | 62 | GGDGYSSSHY | EVQLVESGGGLVQPGGSLRLSCVASGFTFSNYWMMWFRQAPGKGLE |
| | NYWMM | NINQDGSEK | GTDV | WVANINQDGSEKYFVDSVEGRFTISRDNAKNSLYLQMNSLRAEDTAVY |
| | | YFVDSVEG | | YCARGGDGYSSSHYGTDVWGQGTTVTVSS |
| 1.17 | SEQ ID NO: | SEQ ID NO: | SEQ ID NO: 67 | SEQ ID NO: 68 |
| | 65 | 66 | GGDSYGYRDY | EVQLVESGGGLVQPGGSLRLSCAASGFTFSSYWMNWVRQAPGKGLEW |
| | SYWMN | NIKEDGSEKY | GMDV | VANIKEDGSEKYYVDSVKGRFTISRDNAKNSLYLQMNSLRAEDTAVYYCA |
| | | YVDSVKG | | RGGDSYGYRDYGMDVWGQGTTVTVSS |
| 1.18 | SEQ ID NO: | SEQ ID NO: | SEQ ID NO: 71 | SEQ ID NO: 72 |
| | 69 | 70 | GGVGYGDSHF | EVQLVESGGGLVQPGGSLRLSCAASGFTFSTHWMNWARQAPGKELE |
| | THWMN | NINQDGSEK | GMDV | WVANINQDGSEKYYVDSVEGRFTISRDNANNSLYLQMNSLRAEDTAVY |
| | | YYVDSVEG | | YCARGGVGYGDSHFGMDVWGLGTTVTVSS |
| 1.19 | SEQ ID NO: | SEQ ID NO: | SEQ ID NO: 75 | SEQ ID NO: 76 |
| | 73 | 74 | GGDDYSNSHY | EVQLVESGGGLVQPGGSLRLSCAASGFTFSSYWMIWVRQAPGKGLEW |
| | SYWMI | NINQDGSEK | GMDV | VANINQDGSEKYYVDSVKGRFTISRDNAKNSLYLQMNSLRAEDTAVYYC |
| | | YYVDSVKG | | ARGGDDYSNSHYGMDVSGQGTTVTVSS |
| 1.20 | SEQ ID NO: | SEQ ID NO: | SEQ ID NO: 79 | SEQ ID NO: 80 |
| | 77 | 78 | GGFGYGDSHY | EVQLVESGGGLVQPGGSLRLSCAASGFTFSSYWMNWVRQAPGKGLEW |
| | SYWMN | NINQDGSEK | GMDV | VANINQDGSEKYYVDSVQGRFTISRDNANNSLYLQMNSLRAEDTAVYYC |
| | | YYVDSVQG | | ARGGFGYGDSHYGMDVWGQGTTVTVSS |
| 1.21 | SEQ ID NO: | SEQ ID NO: | SEQ ID NO: 83 | SEQ ID NO: 84 |
| | 81 | 82 | GGEGYSDSHY | EVQLVESGGGLVQPGGSLRLSCGASGFTFSSYWMFWFRQAPGKELEW |
| | SYWMF | NVNQDGSEK | GTDV | VANVNQDGSEKYYVDSVEGRFTISRDNAKNSLYLQMNSLRAEDTAIYYC |
| | | YYVDSVEG | | ARGGEGYSDSHYGTDVWGQGTTVTVSS |
| 1.22 | SEQ ID NO: | SEQ ID NO: | SEQ ID NO: 87 | SEQ ID NO: 88 |
| | 85 | 86 | GGEGYGDSHY | QVQLVESGGGLVQPGGSLRLSCAASGFTFSNYWMNWVRQAPGKGLE |
| | NYWMN | NIKEDGSEKY | GMDV | WVANIKEDGSEKYYVDSVEGRFTISRDNARNSLYLQMNSLRAEDTAVYY |
| | | YVDSVEG | | CARGGEGYGDSHYGMDVSGQGTTVTVSS |
| 1.23 | SEQ ID NO: | SEQ ID NO: | SEQ ID NO: 91 | SEQ ID NO: 92 |
| | 89 | 90 | GGEGYGDDHY | QVQLVESGGGLVQPGGSLRLSCAASGFTFSSYWMNWVRQAPGKGLE |
| | SYWMN | NIKQDGSEKY | GMDV | WVANIKQDGSEKYYVDSVKGRFTISRDNAKNSLYLQMNSLTAEDTAVYY |
| | | YVDSVKG | | CARGGEGYGDDHYGMDVWGQGTTVTVSS |
| 1.24 | SEQ ID NO: | SEQ ID NO: | SEQ ID NO: 95 | SEQ ID NO: 96 |
| | 93 | 94 | GGEGYGDYHY | QVQLVESGGGLVQPGGSLRLSCAASGFTFSSYWMSWVRQAPGKGLEW |
| | SYWMS | NIKQDGSEKY | GLDV | VANIKQDGSEKYYVDSVKGRFTISRDNAKNSLYLQMNSLRAEDTAVYYC |
| | | YVDSVKG | | ARGGEGYGDYHYGLDVSGQGTTVTVSS |
| 1.25 | SEQ ID NO: | SEQ ID NO: | SEQ ID NO: 99 | SEQ ID NO: 100 |
| | 97 | 98 | GGDSYGYRDY | EVQLVESGGGLVQPGGSLRLSCAASGFTFSSYWMNWVRQAPGKGLEW |
| | SYWMN | NIKQDGSEKY | GMDV | VANIKQDGSEKYYVDSVKGRFTISRDNAKNSLYLQMNSLRAEDTAVYYC |
| | | YVDSVKG | | ARGGDSYGYRDYGMDVWGQGTTVTVSS |
| 1.26 | SEQ ID NO: | SEQ ID NO: | SEQ ID NO: | SEQ ID NO: 104 |
| | 101 | 102 | 103 | EVQLVESGGGLVQPGGSLRLSCVASGFTFSTHWMNWARQAPGKELEW |
| | THWMN | NINQDGSEK | GGVGYGDSHF | VANINQDGSEKYYVDSVEGRFTISRDNANNSLYLQMNSLRAEDTAVYYC |
| | | YYVDSVEG | GMDV | ARGGVGYGDSHFGMDVWGLGTTVTVSS |
| 1.27 | SEQ ID NO: | SEQ ID NO: | SEQ ID NO: | SEQ ID NO: 108 |
| | 105 | 106 | 107 | EVQLVESGGGLVQPGGSLRLSCGASGFTFSSYWMLWFRQAPGEGLEW |
| | SYWML | NINQDGSEK | GGEGYSDSHH | VANINQDGSEKYYVDSVEGRLTISRDNAKNALYLQMNSLRAEDTAIYYC |
| | | YYVDSVEG | GTDV | ARGGEGYSDSHHGTDVWGQGTTVTVSS |
| 1.28 | SEQ ID NO: | SEQ ID NO: | SEQ ID NO: | SEQ ID NO: 112 |
| | 109 | 110 | 111 | EVQLVESGGGLVQPGGSLRLSCAASGFTFSNYWMNWVRQAPGKGLE |
| | NYWMN | NIKQDGSEKY | GGDNYAYRDF | WVANIKQDGSEKYYVDSVKGRFTISRDNAKNSLYLQMNSLRAEDTAVYY |
| | | YVDSVKG | GMDV | CARGGDNYAYRDFGMDVWGQGTTVTVSS |
| 1.29 | SEQ ID NO: | SEQ ID NO: | SEQ ID NO: | SEQ ID NO: 116 |
| | 113 | 114 | 115 | EVQLVESGGGLVQPGGSLRLSCGASGFTFSNYWMFWFRQAPGKELEW |
| | NYWMF | NVNQDGSEK | GGEGYSDSHY | VANVNQDGSEKYYVDSVEGRFTISRDNAKNSLYLQMNSLRAEDTAIYYC |
| | | YYVDSVEG | GTDV | ARGGEGYSDSHYGTDVWGQGTTVTVSS |
| 1.30 | SEQ ID NO: | SEQ ID NO: | SEQ ID NO: | SEQ ID NO: 120 |
| | 117 | 118 | 119 | EVQLVESGGGLVQPGGSLRLSCAASGFTFSSYWMNWVRQAPGKGLEW |
| | SYWMN | NINQDGSEK | GGEEYGSSHYG | VANINQDGSEKYYVDSVKGRFTISRDNAKNSLYLQMNSLRAEDTAVYYC |
| | | YYVDSVKG | MDV | ARGGEEYGSSHYGMDVWGLGTTVTVSS |
| 1.31 | SEQ ID NO: | SEQ ID NO: | SEQ ID NO: | SEQ ID NO: 124 |
| | 121 | 122 | 123 | EVQLVESGGGLVQPGGSLRLSCAASGFTFSSYWMNWVRQAPGKGLEW |
| | SYWMN | NINQDGSEK | GGDSYGYRDY | VANINQDGSEKYYVDSVKGRFTISRDNAKNSLYLQMNSLRAEDTAVYYC |
| | | YYVDSVKG | GMDV | ARGGDSYGYRDYGMDVWGQGTTVTVSS |
| 1.32 | SEQ ID NO: | SEQ ID NO: | SEQ ID NO: | SEQ ID NO: 128 |
| | 125 | 126 | 127 | EVQLVESGGGLVQPGGSLRLSCAASGFTFSSYWMNWVRQTPGKGLEW |
| | SYWMN | NINQNGSEK | GGFGYGDSHY | VANINQNGSEKYYVDSVEGRFNISRDNAKNSLYLQMSSLRAEDTAVYYC |
| | | YYVDSVEG | GMDV | ARGGFGYGDSHYGMDVWGQGTTVTVSS |
| 1.33 | SEQ ID NO: | SEQ ID NO: | SEQ ID NO: | SEQ ID NO: 132 |
| | 129 | 130 | 131 | EVQLVESGGGLVQAGGSLRLSCVASGFTFSNYWMTWFRQAPGKGLEW |
| | NYWMT | NINQDESEEY | GGDGYSDSHY | VANINQDESEEYYVDSVKGRFTISRDNAKNSLFLQMNSLRAEDTAIYYCA |
| | | YVDSVKG | GTDV | RGGDGYSDSHYGTDVWGQGTTVTVSS |
| 1.34 | SEQ ID NO: | SEQ ID NO: | SEQ ID NO: | SEQ ID NO: 136 |
| | 133 | 134 | 135 | QVQLQESGGGLVQPGGSLRLSCTASGFTFSNYWMNWVRQAPGKGLE |
| | NYWMN | NIKEDGSENY | GGEGYSTSHYG | WVANIKEDGSENYYVDSVKGRFTISRDNAKNSLYLQMNSLRAEDTAVYY |
| | | YVDSVKG | MDV | CARGGEGYSTSHYGMDVWGQGTTVTVSS |
| 1.35 | SEQ ID NO: | SEQ ID NO: | SEQ ID NO: | SEQ ID NO: 140 |
| | 137 | 138 | 139 | QVQLVESGGGLVQPGGSLRLSCAASGFTFSNYWMNWVRQAPGKGLE |
| | NYWMN | NIKQDGSEKY | GGEGYGESHY | WVANIKQDGSEKYYVDSVEGRFTISRDNAKNSLYLQMDSLRAEDTAVYY |
| | | YVDSVEG | GMDV | CARGGEGYGESHYGMDVSGQGTTVTVSS |
| 1.36 | SEQ ID NO: | SEQ ID NO: | SEQ ID NO: | SEQ ID NO: 144 |
| | 141 | 142 | 143 | EVQLVESGGGLVQPGGSLRLSCAASGFTFSTYWMNWVRQAPGKGLE |
| | TYWMN | NIKQDGSEKY | GGDSYGYRDY | WVANIKQDGSEKYYVDSVKGRFTISRDNAKNSLYLQMNSLRAEDTAVYY |
| | | YVDSVKG | GMDV | CARGGDSYGYRDYGMDVWGQGTTVTVSS |
| 1.37 | SEQ ID NO: | SEQ ID NO: | SEQ ID NO: | SEQ ID NO: 148 |
| | 145 | 146 | 147 | EVQLVESGGGLVQPGGSLRLSCAASGFTFSYYWMIWFRQAPGEELEWV |
| | YYWMI | NINQDGSEK | GGDGYSNSHF | ANINQDGSEKYYVDSVKGRFIISRDNATNSLFLQMNSLRAEDTAVYYCAR |
| | | YYVDSVKG | GMDV | GGDGYSNSHFGMDVWGQGTTVTVSS |
| 1.38 | SEQ ID NO: | SEQ ID NO: | SEQ ID NO: | SEQ ID NO: 152 |
| | 149 | 150 | 151 | EVQLVESGGGLVQPGGSLRLSCAASGFTFSNYWMIWYRQAPGEELEW |
| | NYWMI | NINQDGSEK | GGEGYSDSHY | VANINQDGSEKYYVDSVKGRFTISRDNAKNSLYLQMNSLRAEDTAIYYCA |
| | | YYVDSVKG | GTDV | RGGEGYSDSHYGTDVWGQGTTVTVSS |
| 1.39 | SEQ ID NO: | SEQ ID NO: | SEQ ID NO: | SEQ ID NO: 156 |
| | 153 | 154 | 155 | EVQLVESGGGLVQPGGSLRLSCAASGFTFSNYWMNWVRQAPGKELE |
| | NYWMN | NINQDESEKY | GGFGYGDSHF | WVANINQDESEKYYVDSVKGRFTVSRDNAKNSLFLQMNSLRADDTAVY |
| | | YVDSVKG | GMDV | YCARGGFGYGDSHFGMDVWGQGTTVTVSS |
| 1.40 | SEQ ID NO: | SEQ ID NO: | SEQ ID NO: | SEQ ID NO: 160 |
| | 157 | 158 | 159 | EVQLVESGGGLVQPGGSLRLSCGASGFTFSNYWMFWFRQAPGKELEW |
| | NYWMF | NVNQDGSEK | GGEGYSDSHY | VANVNQDGSEKYYVDSVEGRFTISRDDAKNSLYLQMNSLRAEDTAIYYC |
| | | YYVDSVEG | GTDV | ARGGEGYSDSHYGTDVWGQGTTVTVSS |
| 1.41 | SEQ ID NO: | SEQ ID NO: | SEQ ID NO: | SEQ ID NO: 164 |
| | 161 | 162 | 163 | EVQLVESGGGLVQPGGSLRLSCGASGFTFSNYWMFWFRQAPGKELEW |
| | NYWMF | NVNQNGSEK | GGEGYSDSHY | VANVNQNGSEKYYVDSVEGRFTISRDNAKNSLYLQMNSLRAEDTAIYYC |
| | | YYVDSVEG | GTDV | ARGGEGYSDSHYGTDVWGQGTTVTVSS |
| 1.42 | SEQ ID NO: | SEQ ID NO: | SEQ ID NO: | SEQ ID NO: 168 |
| | 165 | 166 | 167 | QVQLVESGGGLVQPGGSLRLSCAASGFTFSNYWMNWVRQAPGKGLE |
| | NYWMN | NIKQDGSEKY | GGEGYGDSHY | WVANIKQDGSEKYYVDSVKGRFTISRDNAKDSLYLQMNSLRAEDTAIYY |
| | | YVDSVKG | GMDV | CARGGEGYGDSHYGMDVSGQGTTVTVSS |
| 1.43 | SEQ ID NO: | SEQ ID NO: | SEQ ID NO: | SEQ ID NO: 172 |
| | 169 | 170 | 171 | EVQLVESGGGLVQPGGSLRLSCAASGFTFSNYWMIWYRQAPGEELEW |
| | NYWMI | NINQDGSEK | GGDGYSNSHY | VANINQDGSEKYYVDSVKGRFTISRDNATNSLFLQMNSLRAEDTAVYYC |
| | | YYVDSVKG | GMDV | ARGGDGYSNSHYGMDVWGQGTTVTVSS |
| 1.44 | SEQ ID NO: | SEQ ID NO: | SEQ ID NO: | SEQ ID NO: 176 |
| | 173 | 174 | 175 | EVQLVESGGGLVQPGGSLRLSCAASGFTFSDYWMIWYRQAPGEELEW |
| | DYWMI | NINQDGSEK | GGDGYSNSHY | VANINQDGSEKYYVDSVKGRFTISRDNATNSLFLQMNSLRAEDTAVYYC |
| | | YYVDSVKG | GMDV | ARGGDGYSNSHYGMDVWGQGTTVTVSS |
| 1.45 | SEQ ID NO: | SEQ ID NO: | SEQ ID NO: | SEQ ID NO: 180 |
| | 177 | 178 | 179 | EVQLVESGGGLVQPGGSLRLSCAASGFTFSKYWMIWVRQAPEKGLEW |
| | KYWMI | NINQDGSEK | GGDDYSNSHY | VANINQDGSEKYYVDSVEGRFTISRDNVNNSLYLQMNSLRAEDTAVYYC |
| | | YYVDSVEG | GMDV | ARGGDDYSNSHYGMDVSGQGTTVTVSS |
| 1.46 | SEQ ID NO: | SEQ ID NO: | SEQ ID NO: | SEQ ID NO: 184 |
| | 181 | 182 | 183 | EVQLVESGGGLVQPGGSLRLSCAASGFTFSNYWMSWVRQAPGRGLEW |
| | NYWMS | NINQDGSEK | GGEEYSSSHYG | VANINQDGSEKYYVDSVKGRFTISRDNAKSSLYLQMNSLRAEDTAVYYC |
| | | YYVDSVKG | MDV | ARGGEEYSSSHYGMDVWGQGTTVTVSS |
| 1.47 | SEQ ID NO: | SEQ ID NO: | SEQ ID NO: | SEQ ID NO: 188 |
| | 185 | 186 | 187 | EVQLVESGGGLVQPGGSLRLSCIASGFSFSNYWMNWVRQAPGKGLEW |
| | NYWMN | NIKQDGSEN | GGEGYSTSHYG | VANIKQDGSENYYVDSVKGRFTISRDNAKNSLYLQMNSLRAEDTAVYYC |
| | | YYVDSVKG | MDV | ARGGEGYSTSHYGMDVWGQGTAVTVSS |
| 1.48 | SEQ ID NO: | SEQ ID NO: | SEQ ID NO: | SEQ ID NO: 192 |
| | 189 | 190 | 191 | QVQLVESGGGLVQPGGSLRLSCAASGFTFSSYWMSWVRQAPGKGLEW |
| | SYWMS | NIKQDGSEKY | GGEGYGVDHY | VANIKQDGSEKYYVDSVKGRFTISRDNAKNSLYLQMSSLRAEDTAVYFCA |
| | | YVDSVKG | GLDV | RGGEGYGVDHYGLDVSGQGTTVTVSS |
| 1.49 | SEQ ID NO: | SEQ ID NO: | SEQ ID NO: | SEQ ID NO: 196 |
| | 193 | 194 | 195 | EVQLVESGGGLVQPGGSLRLSCGASGFTFSSYWMLWFRQAPGKELEW |
| | SYWML | NVNQDGSEN | GGEDYGNSHF | VANVNQDGSENYYVDSVEGRFTISRDNAKNSLYLQMHSLRAEDTAVYY |
| | | YYVDSVEG | GMDV | CARGGEDYGNSHFGMDVWGQGTMVIVSS |
| 1.50 | SEQ ID NO: | SEQ ID NO: | SEQ ID NO: | SEQ ID NO: 200 |
| | 197 | 198 | 199 | EVQLVESGGGLVQPGRSLRLSCAASGFTFSNYWMIWYRQAPGEELEWV |
| | NYWMI | NINQDGSEK | GGDGYSNSHY | ANINQDGSEKYYVDSVKGRFTISRDNATNSLFLQMNSLRAEDTAVYYCA |
| | | YYVDSVKG | GMDV | RGGDGYSNSHYGMDVWGQGTTVTVSS |
| 1.51 | SEQ ID NO: | SEQ ID NO: | SEQ ID NO: | SEQ ID NO: 204 |
| | 201 | 202 | 203 | EVQLVESGGGLVKPGGSLRLSCAASGFTFSNYWMIWYRQAPGEELEWV |
| | NYWMI | NINQDGSEK | GGDGYSNSHY | ANINQDGSEKYYVDSVKGRFTISRDNATNSLFLQMNSLRAEDTAVYYCA |
| | | YYVDSVKG | GMDV | RGGDGYSNSHYGMDVWGQGTTVTVSS |
| 1.52 | SEQ ID NO: | SEQ ID NO: | SEQ ID NO: | SEQ ID NO: 208 |
| | 205 | 206 | 207 | EVQLVESGGGLVQIGGSLRLSCAASGFTFSKYWMIWVRQAPEKGLEWV |
| | KYWMI | NINQDGSEK | GGDDYSISHFG | ANINQDGSEKYYVDSVEGRFTISRDNANNSLFLQMNSLRAEDTAVYYCA |
| | | YYVDSVEG | MDV | RGGDDYSISHFGMDVSGQGTRVTVSS |
| 1.53 | SEQ ID NO: | SEQ ID NO: | SEQ ID NO: | SEQ ID NO: 212 |
| | 209 | 210 | 211 | EVQLVESGGGLVQIGGSLRLSCVASGFTFSKYWMIWVRQAPEKGLEWV |
| | KYWMI | NINQDGSEK | GGDDYSHSHY | ANINQDGSEKYYVDSVEGRFTISRDNANNSLYLQMNSLRAEDTAVYYCA |
| | | YYVDSVEG | GMDV | RGGDDYSHSHYGMDVSGQGTTVTVSS |
| 1.54 | SEQ ID NO: | SEQ ID NO: | SEQ ID NO: | SEQ ID NO: 216 |
| | 213 | 214 | 215 | EVQLVESGGGLVQPGGSLRLSCAASGFNFSNYWMNWVRQAPGKELE |
| | NYWMN | NINQDGSEK | GGFGYGDSHY | WVANINQDGSEKYYVDSVKGRFTISRDNAKNSLFLQMNSLRADDTAVY |
| | | YYVDSVKG | GMDV | YCARGGFGYGDSHYGMDVWGQGTTVTVSS |
| 1.55 | SEQ ID NO: | SEQ ID NO: | SEQ ID NO: | SEQ ID NO: 220 |
| | 217 | 218 | 219 | EVQLVESGGGLVQPGGSLRLSCAASGFTFGSYWLNWVRQAPGKGLEW |
| | SYWLN | NINQDGSEN | GGEDYGNSHF | VANINQDGSENYYVDSVEGRFTISRDNAKNSLYLQMHSLRAEDTAVYYC |
| | | YYVDSVEG | GMDV | ARGGEDYGNSHFGMDVWGQGTMVTVSS |
| 1.56 | SEQ ID NO: | SEQ ID NO: | SEQ ID NO: | SEQ ID NO: 224 |
| | 221 | 222 | 223 | QVQLVESGGGLVKPGGSLRLSCAASGFTFSSYWMSWVRQAPGKGLEW |
| | SYWMS | NIKQDGSEKY | GGEGYGVDHY | VANIKQDGSEKYYVDSVKGRFTISRDNAKNSLYLQMSSLRAEDTAVYFCA |
| | | YVDSVKG | GLDV | RGGEGYGVDHYGLDVSGQGTTVTVSS |
| 1.57 | SEQ ID NO: | SEQ ID NO: | SEQ ID NO: | SEQ ID NO: 228 |
| | 225 | 226 | 227 | QVQLVESGGGLVQPGGSLRLSCTASGFTFSDYWMNWVRQAPGKGLE |
| | DYWMN | NIKEDGSEKY | GGEGYGDNHY | WVANIKEDGSEKYYVDSVEGRFTISRDNARNSLYLQMTSLREEDTAMYY |
| | | YVDSVEG | GMDV | CARGGEGYGDNHYGMDVSGQGTTVTVSS |
| 1.58 | SEQ ID NO: | SEQ ID NO: | SEQ ID NO: | SEQ ID NO: 232 |
| | 229 | 230 | 231 | EVQLVESGGGLVQPGGSLRLSCAASGFTFRSYWMNWVRQAPGKEAE |
| | SYWMN | NINQDGSEK | GGPDYGDLHY | WVANINQDGSEKYYVDSVEGRFTISRDNAKNSLFLQMNSLRDEDTAVY |
| | | YYVDSVEG | GMDV | YCARGGPDYGDLHYGMDVWGQGTTVTVSS |
| 1.59 | SEQ ID NO: | SEQ ID NO: | SEQ ID NO: | SEQ ID NO: 236 |
| | 233 | 234 | 235 | QVQLVESGGGLVQPGGSLRLSCAASGFTFSRYWMSWVRQAPGKGLER |
| | RYWMS | NINQDGREK | GGEGYGDYHY | VANINQDGREKYYVDSVKGRFTISRDNAKNSLYLQMNSLRAEDTAVYYC |
| | | YYVDSVKG | GMDV | ARGGEGYGDYHYGMDVSGQGTTVTVSS |
| 1.60 | SEQ ID NO: | SEQ ID NO: | SEQ ID NO: | SEQ ID NO: 240 |
| | 237 | 238 | 239 | EVQLVESGGGLVQPGGSPRLSCAASGFTLSNYWMIWYRQAPGEKLEW |
| | NYWMI | NINQDGSEK | GGDGYSNSHY | VANINQDGSEKYYVDSVKGRFTISRDNATNSLFLQMNSLRAEDTAVYYC |
| | | YYVDSVKG | GMDV | ARGGDGYSNSHYGMDVWGQGTTVTVSS |
| 1.61 | SEQ ID NO: | SEQ ID NO: | SEQ ID NO: | SEQ ID NO: 244 |
| | 241 | 242 | 243 | EVQLVESGGGLVQPGGSLRLSCVASGFNFSNYWMNWVRQAPGKELE |
| | NYWMN | NINQDESEKY | GGFGYGDSHF | WVANINQDESEKYYVDSVKGRFTISRDNAKNSLFLQMNSLRADDTAVY |
| | | YVDSVKG | GMDV | YCARGGFGYGDSHFGMDVWGQGTTVTVSS |
| 1.62 | SEQ ID NO: | SEQ ID NO: | SEQ ID NO: | SEQ ID NO: 248 |
| | 245 | 246 | 247 | EVQLVESGGGLVQPGGSLRLSCAASGFNFSNYWMNWVRQAPGKELE |
| | NYWMN | NINQDESEKY | GGFGYGDSHF | WVANINQDESEKYYVDSVKGRFTIFRDNAKNSLFLQMNSLRADDTAVY |
| | | YVDSVKG | GMDV | YCARGGFGYGDSHFGMDVWGQGTTVTVSS |
| 1.63 | SEQ ID NO: | SEQ ID NO: | SEQ ID NO: | SEQ ID NO: 252 |
| | 249 | 250 | 251 | EVQLVESGGGLVQPGGSLSLSCAASGFTFRSFWMNWVRQAPGKEAEW |
| | SFWMN | NINQDGSEK | GGPDYGDLHY | VANINQDGSEKYYVDSVKGRFTISRDNAKNSLFLQMNSLRAEDTAVYYC |
| | | YYVDSVKG | GMDV | ARGGPDYGDLHYGMDVWGQGTTVTVSS |
| 1.64 | SEQ ID NO: | SEQ ID NO: | SEQ ID NO: | SEQ ID NO: 256 |
| | 253 | 254 | 255 | EVQLVESGGGLVQPGGSLRLSCAASGFTFRSYWMNWVRQAPGKEAE |
| | SYWMN | NINQDGSEK | GGPDYGDLHY | WVANINQDGSEKYYVDSVKGRFTISRDNAKNSLFLQMNSLRDEDTAVY |
| | | YYVDSVKG | GMDV | YCARGGPDYGDLHYGMDVWGQGTTVTVSS |
| 1.65 | SEQ ID NO: | SEQ ID NO: | SEQ ID NO: | SEQ ID NO: 260 |
| | 257 | 258 | 259 | EVQLVESGGGLVQPGGSLRLSCAASGFTFSNYWMIWYRQAPGEELEW |
| | NYWMI | NINQDGSEK | GGEDYGNSHY | VANINQDGSEKYYVDSVKGRFTISRDNAKNSLYLQMHSLRAEDTAVYYC |
| | | YYVDSVKG | GMDV | ARGGEDYGNSHYGMDVWGQGTMVIVSS |
| 1.66 | SEQ ID NO: | SEQ ID NO: | SEQ ID NO: | SEQ ID NO: 264 |
| | 261 | 262 | 263 | EVQLVESGGGLVQPGGSLRLSCAASGFTFSNYWMNWVRQAPGKGLE |
| | NYWMN | NINQDGSER | GGEGYGIDHY | WVANINQDGSERYYVDSVKGRFTISRDNAKSSLYLQMNSLRAEDTAVYF |
| | | YYVDSVKG | GLDV | CARGGEGYGIDHYGLDVSGQGTTVTVSS |
| 1.67 | SEQ ID NO: | SEQ ID NO: | SEQ ID NO: | SEQ ID NO: 268 |
| | 265 | 266 | 267 | QVQLVESGGGLVQPGGSLRLSCAASGFTFSSYWMSWVRQAPGKGLEW |
| | SYWMS | NINQDGSER | GGEGYGVDHY | VANINQDGSERYYVDSVKGRFTISRDNAKSSLYLQMSSLRAEDTAVYFCA |
| | | YYVDSVKG | GLDV | RGGEGYGVDHYGLDVSGQGTTVTVSS |
| 1.68 | SEQ ID NO: | SEQ ID NO: | SEQ ID NO: | SEQ ID NO: 272 |
| | 269 | 270 | 271 | QVQLVESGGGLVQPGGSLRLSCAASGFTFSNYWMIWVRQAPGKGLEW |
| | NYWMI | NINQDGSEK | GGEGYGVDHY | VANINQDGSEKYYVDSVEGRFTISRDNAKSSLYLQMSNLRAEDTAVYFC |
| | | YYVDSVEG | GLDV | ARGGEGYGVDHYGLDVSGQGTTVTVSS |
| 1.69 | SEQ ID NO: | SEQ ID NO: | SEQ ID NO: | SEQ ID NO: 276 |
| | 273 | 274 | 275 | QVQLVESGGGLVQPGGSLRLSCAATGFTLSNYWMNWVRQAPGKGLE |
| | NYWMN | NINQDGSEK | GGTGYGSDHY | WVANINQDGSEKYYVDSVKGRFTISRDNAKNSLFLQMNSLRAEDTAVY |
| | | YYVDSVKG | GMDV | YCARGGTGYGSDHYGMDVSGQGTTVTVSS |
| 1.70 | SEQ ID NO: | SEQ ID NO: | SEQ ID NO: | SEQ ID NO: 280 |
| | 277 | 278 | 279 | EVQLVESGGGLVQPGGSLRLSCAASGFNFSNYWMNWVRQAPGKELE |
| | NYWMN | NINQDGSEN | GGFGYGDSHY | WVANINQDGSENYYVDSVKGRFTISRDNVKNSLFLQMNRLRADDTAVY |
| | | YYVDSVKG | GMDV | YCARGGFGYGDSHYGMDVWGQGTTVTVSS |
| 1.71 | SEQ ID NO: | SEQ ID NO: | SEQ ID NO: | SEQ ID NO: 284 |
| | 281 | 282 | 283 | EVQLVESGGGLVQPGGSLRLSCAASGFTFGNYWMIWVRQAPGKELEW |
| | NYWMI | NINQNGSER | GGADYSNSHY | LANINQNGSERYYVDSVQGRFTISRDNAKNSLYLQMNSLRAEDTAVYYC |
| | | YYVDSVQG | GMDV | ARGGADYSNSHYGMDVSGQGTTVTVSS |
| 1.72 | SEQ ID NO: | SEQ ID NO: | SEQ ID NO: | SEQ ID NO: 288 |
| | 285 | 286 | 287 | QVQLVESGGGLVQPGGSLRLSCAASGFTFSSYWMSWVRQAPGKGLEW |
| | SYWMS | NINQDGSER | GGEGYGVDHY | VANINQDGSERYYVDSVKGRFTISRDNANNSLHLQMSSLRAEDTAVYFC |
| | | YYVDSVKG | GLDV | ARGGEGYGVDHYGLDVSGQGTTVTVSS |
| 1.73 | SEQ ID NO: | SEQ ID NO: | SEQ ID NO: | SEQ ID NO: 292 |
| | 289 | 290 | 291 | EVQLVESGGGLVQPGGSLRLSCAASGFTFRSYWMNWVRQAPGKEAE |
| | SYWMN | NINPDGSEKY | GGPGYGDLHY | WVANINPDGSEKYYVDSVQGRHTISRDNAKNSLFLEMNSLRVEDTALYY |
| | | YVDSVQG | GMDV | CARGGPGYGDLHYGMDVWGQGTTVTVSS |
| 1.74 | SEQ ID NO: | SEQ ID NO: | SEQ ID NO: | SEQ ID NO: 296 |
| | 293 | 294 | 295 | QVQLVESGGGLVQPGGSLRLSCAATGFTLSNYWMNWVRQAPGKGLE |
| | NYWMN | NINQDGSEK | GGEGYGVDHY | WVANINQDGSEKYYVDSVEGRFTISRDNAKSSLYLQMSSLRAEDTAVYF |
| | | YYVDSVEG | GLDV | CARGGEGYGVDHYGLDVSGQGTTVTVSS |
| 1.75 | SEQ ID NO: | SEQ ID NO: | SEQ ID NO: | SEQ ID NO: 300 |
| | 297 | 298 | 299 | QVQLVESGGGLVQPGGSLRLSCAASGFTFSDYYMSWIRQAPGKGLEWV |
| | DYYMS | NINQDGSER | GGEGYGVDHY | ANINQDGSERYYVDSVKGRFTISRDNAKNSLYLQMSSLRAEDTAVYFCA |
| | | YYVDSVKG | GLDV | RGGEGYGVDHYGLDVSGQGTTVTVSS |
| 1.76 | SEQ ID NO: | SEQ ID NO: | SEQ ID NO: | SEQ ID NO: 304 |
| | 301 | 302 | 303 | EVQLVESGGGLVQPGGSLRLSCAATGFTLSNYWMNWVRQAPGKGLE |
| | NYWMN | NINQDGSER | GGEGYGVDHY | WVANINQDGSERYYVDSVKGRFTISRDNAKNSLYLQMSSLRAEDTAVYF |
| | | YYVDSVKG | GLDV | CARGGEGYGVDHYGLDVSGQGTTVTVSS |
| 1.77 | SEQ ID NO: | SEQ ID NO: | SEQ ID NO: | SEQ ID NO: 308 |
| | 305 | 306 | 307 | QVQLVESGGGLVQPGGSLRLSCAASGFTLSNYWMNWVRQAPGKGLE |
| | NYWMN | NINQDGSER | GGEGYGVDHY | WVANINQDGSERYYVDSVKGRFTISRDNAKNSLYLQMSSLRAEDTAVYF |
| | | YYVDSVKG | GLDV | CARGGEGYGVDHYGLDVSGQGTTVTVSS |
| 1.78 | SEQ ID NO: | SEQ ID NO: | SEQ ID NO: | SEQ ID NO: 312 |
| | 309 | 310 | 311 | QVQLVESGGGLVQPGGSLRLSCAATGFTLSNYWMNWVRQAPGKGLE |
| | NYWMN | NINQDGSER | GGEGYGVDHY | WVANINQDGSERYYVDSVKGRFTISRDNAKNSLYLQMSSLRAEDTAVYF |
| | | YYVDSVKG | GLDV | CARGGEGYGVDHYGLDVSGQGTTVTVSS |
| 1.79 | SEQ ID NO: | SEQ ID NO: | SEQ ID NO: | SEQ ID NO: 316 |
| | 313 | 314 | 315 | QVQLVESGGGLVQPGGSLRLSCAATGFTLSNYWMNWVRQAPGKGLE |
| | NYWMN | NINQDGSER | GGEGYGVNHY | WVANINQDGSERYYVDSVKGRFTISRDNAKNSLYLQMSSLRAEDTAVYF |
| | | YYVDSVKG | GLDV | CARGGEGYGVNHYGLDVSGQGTTVTVSS |
| 1.80 | SEQ ID NO: | SEQ ID NO: | SEQ ID NO: | SEQ ID NO: 320 |
| | 317 | 318 | 319 | QVQLVESGGGLVKPGGSLRLSCVASGFTFSDYYMSWIRQAPGKGLEWV |
| | DYYMS | NIKQDGSERY | GGEGYGVDHY | ANIKQDGSERYYVDSVKGRFTISRDNAKSSLYLQMSSLRAEDTAVYFCAR |
| | | YVDSVKG | GLDV | GGEGYGVDHYGLDVSGQGTTVTVSS |
| 1.81 | SEQ ID NO: | SEQ ID NO: | SEQ ID NO: | SEQ ID NO: 324 |
| | 321 | 322 | 323 | QVQLVESGGGLVQPGGSLRLSCAATGFTLSNYWMNWVRQAPGKGLE |
| | NYWMN | NINQDGSER | GGEGYGVDHY | WVANINQDGSERYYVDSVEGRFTISRDNAKSSLYLQMSNLRAEDTAVYF |
| | | YYVDSVEG | GLDV | CARGGEGYGVDHYGLDVSGQGTTVTVSS |
| 1.82 | SEQ ID NO: | SEQ ID NO: | SEQ ID NO: | SEQ ID NO: 328 |
| | 325 | 326 | 327 | QVQLVESGGGLVQPGGSLRLSCAATGFTLSNYWMNWVRQAPGKGLE |
| | NYWMN | NINQDGSER | GGEGYGVDHY | WVANINQDGSERYYVDSVKGRFTISRDNAKSSLYLQMSSLRAEDTAVYF |
| | | YYVDSVKG | GLDV | CARGGEGYGVDHYGLDVSGQGTTVTVSS |
| 1.83 | SEQ ID NO: | SEQ ID NO: | SEQ ID NO: | SEQ ID NO: 332 |
| | 329 | 330 | 331 | QVQLQESGGGLVQPGGSLRLSCAATGFTLSNYWMNWVRQAPGKGLE |
| | NYWMN | NINQDGSER | GGEGYGVDHY | WVANINQDGSERYYVDSVKGRFTISRDNAKNSLYLQMSSLRAEDTAVYF |
| | | YYVDSVKG | GLDV | CARGGEGYGVDHYGLDVSGQGTTVTVSS |
| 1.84 | SEQ ID NO: | SEQ ID NO: | SEQ ID NO: | SEQ ID NO: 336 |
| | 333 | 334 | 335 | QVQLVESGGGLVKPGGSLRLSCAATGFTLSNYWMNWVRQAPGKGLE |
| | NYWMN | NINQDGSER | GGEGYGVDHY | WVANINQDGSERYYVDSVKGRFTISRDNAKNSLYLQMSSLRAEDTAVYF |
| | | YYVDSVKG | GLDV | CARGGEGYGVDHYGLDVSGQGTTVTVSS |
| 1.85 | SEQ ID NO: | SEQ ID NO: | SEQ ID NO: | SEQ ID NO: 340 |
| | 337 | 338 | 339 | QVQLVESGGGLVQPGGSLRLSCAATGFTLSNYWMNWVRQAPGKGLE |
| | NYWMN | NINQDGSER | GGEGYGVDHY | WVANINQDGSERYYVDSVKGRFTISRDNANNSLHLQMSSLRAEDTAVY |
| | | YYVDSVKG | GLDV | FCARGGEGYGVDHYGLDVSGQGTTVTVSS |
| 1.86 | SEQ ID NO: | SEQ ID NO: | SEQ ID NO: | SEQ ID NO: 344 |
| | 341 | 342 | 343 | QVQLGESGGGLVQPGGSLRLSCAATGFTLSNYWMNWVRQAPGKGLE |
| | NYWMN | NINQDGSER | GGEGYGVDHY | WVANINQDGSERYYVDSVEGRFTISRDNAKSSLYLQMSNLRAEDTAVYF |
| | | YYVDSVEG | GLDV | CARGGEGYGVDHYGLDVSGQGTTVTVSS |
| 1.87 | SEQ ID NO: | SEQ ID NO: | SEQ ID NO: | SEQ ID NO: 348 |
| | 345 | 346 | 347 | QVQLVESGGGLVQPGGSLKLSCAATGFTLSNYWMNWVRQAPGKGLE |
| | NYWMN | NINQDGSER | GGEGYGVDHY | WVANINQDGSERYYVDSVKGRFTISRDNAKSSLYLQMSSLRAEDTAVYF |
| | | YYVDSVKG | GLDV | CARGGEGYGVDHYGLDVSGQGTTVTVSS |
| 1.88 | SEQ ID NO: | SEQ ID NO: | SEQ ID NO: | SEQ ID NO: 352 |
| | 349 | 350 | 351 | QVQLQESGGGLVQPGGSLRLSCAATGFTLSNYWMNWVRQAPGKGLE |
| | NYWMN | NINQDGSER | GGEGYGVDHY | WVANINQDGSERYYVDSVKGRFTISRGNAKNSLYLQMSSLRAEDTAVYF |
| | | YYVDSVKG | GLDV | CARGGEGYGVDHYGLDVSGQGTTVTVSS |
| 1.89 | SEQ ID NO: | SEQ ID NO: | SEQ ID NO: | SEQ ID NO: 356 |
| | 353 | 354 | 355 | QVQLVESGGGVVQPGRSLRLSCAASGFTFDDYGMSWVRQAPGKGLE |
| | DYGMS | NINQDGSER | GGEGYGVDHY | WVANINQDGSERYYVDSVKGRFTISRDNAKNSLYLQMSSLRAEDTAVYF |
| | | YYVDSVKG | GLDV | CARGGEGYGVDHYGLDVSGQGTTVTVSS |
| 1.90 | SEQ ID NO: | SEQ ID NO: | SEQ ID NO: | SEQ ID NO: 360 |
| | 357 | 358 | 359 | EVQLVESGGGLVQPGGSLRLSCAASGFTFSSHWMTWVRQAPGKGLEW |
| | SHWMT | HIKEDGSEKY | GGDGYSDSHF | VAHIKEDGSEKYYEDSVEGRFTVSRDNAKNSVYLQMNSLRAEDTAVYYC |
| | | YEDSVEG | GVDV | ARGGDGYSDSHFGVDVWGQGTTVTVSS |
| 1.91 | SEQ ID NO: | SEQ ID NO: | SEQ ID NO: | SEQ ID NO: 364 |
| | 361 | 362 | 363 | EVQLVESGGGLVQPGGSLRLSCAASGFTFSSHWMTWFRQAPGKGLEW |
| | SHWMT | HIKEDGSEKY | GGDGYSDSHF | VAHIKEDGSEKYYVDSVKGRFTVSRDNAKNSVYLQMNSLRAEDTAVYYC |
| | | YVDSVKG | GVDV | ARGGDGYSDSHFGVDVWGQGTTVTVSS |
| 1.92 | SEQ ID NO: | SEQ ID NO: | SEQ ID NO: | SEQ ID NO: 368 |
| | 365 | 366 | 367 | EVQLVESGGGLVQPGGSLRLSCAASGFTFSSHWMTWFRQAPGKGLEW |
| | SHWMT | HIKEDGSEKY | GGDGYSDSHF | VAHIKEDGSEKYYEDSVKGRFTVSRDNAKNSVYLQMNSLRAEDTAVYYC |
| | | YEDSVKG | GVDV | ARGGDGYSDSHFGVDVWGQGTTVTVSS |
| 1.93 | SEQ ID NO: | SEQ ID NO: | SEQ ID NO: | SEQ ID NO: 372 |
| | 369 | 370 | 371 | EVQLVESGGGLVQPGGSLRLSCAASGFTFSSHWMTWFRQAPGKGLEW |
| | SHWMT | HIKEDGSEKY | GGDGYSDSHF | VAHIKEDGSEKYYEDSVEGRFTISRDNAKNSVYLQMNSLRAEDTAVYYCA |
| | | YEDSVEG | GVDV | RGGDGYSDSHFGVDVWGQGTTVTVSS |
| 1.94 | SEQ ID NO: | SEQ ID NO: | SEQ ID NO: | SEQ ID NO: 376 |
| | 373 | 374 | 375 | EVQLVESGGGLVQPGGSLRLSCAASGFTFSSHWMTWFRQAPGKGLEW |
| | SHWMT | HIKEDGSEKY | GGDGYSDSHF | VAHIKEDGSEKYYEDSVEGRFTVSRDNAKNSLYLQMNSLRAEDTAVYYC |
| | | YEDSVEG | GVDV | ARGGDGYSDSHFGVDVWGQGTTVTVSS |
| 1.95 | SEQ ID NO: | SEQ ID NO: | SEQ ID NO: | SEQ ID NO: 380 |
| | 377 | 378 | 379 | EVQLVESGGGLVQPGGSLRLSCAASGFTFSSHWMTWVRQAPGKGLEW |
| | SHWMT | HIKEDGSEKY | GGDGYSDSHF | VAHIKEDGSEKYYVDSVKGRFTISRDNAKNSLYLQMNSLRAEDTAVYYCA |
| | | YVDSVKG | GVDV | RGGDGYSDSHFGVDVWGQGTTVTVSS |
| 1.96 | SEQ ID NO: | SEQ ID NO: | SEQ ID NO: | SEQ ID NO: 384 |
| | 381 | 382 | 383 | EVQLVESGGGLVQPGGSLRLSCAASGFTFSSHWMTWFRQAPGKGLEW |
| | SHWMT | HIKEDGSEKY | GGDGYSDSHF | VAHIKEDGSEKYYVDSVKGRFTISRDNAKNSLYLQMNSLRAEDTAVYYCA |
| | | YVDSVKG | GVDV | RGGDGYSDSHFGVDVWGQGTTVTVSS |
| 1.97 | SEQ ID NO: | SEQ ID NO: | SEQ ID NO: | SEQ ID NO: 388 |
| | 385 | 386 | 387 | EVQLVESGGGLVQPGGSLRLSCAASGFTFSSHWMTWVRQAPGKGLEW |
| | SHWMT | HIKEDESEKY | GGVGYSISHFG | VAHIKEDESEKYYVDSVKGRFTISRDNAKNSLYLQMNSLRAEDTAVYYCA |
| | | YVDSVKG | VDV | RGGVGYSISHFGVDVWGQGTTVTVSS |
| 1.98 | SEQ ID NO: | SEQ ID NO: | SEQ ID NO: | SEQ ID NO: 392 |
| | 389 | 390 | 391 | EVQLVESGGGLVQPGGSLRLSCAASGFTFSSHWMTWVRQAPGKGLEW |
| | SHWMT | HIKEDESEKY | GGEGYSISHFG | VAHIKEDESEKYYVDSVKGRFTISRDNAKNSLYLQMNSLRAEDTAVYYCA |
| | | YVDSVKG | VDV | RGGEGYSISHFGVDVWGQGTTVTVSS |
| 1.99 | SEQ ID NO: | SEQ ID NO: | SEQ ID NO: | SEQ ID NO: 396 |
| | 393 | 394 | 395 | EVQLVESGGGLVQPGGSLRLSCAASGFTFSSHWMTWFRQAPGKGLEW |
| | SHWMT | HIKEDESEKY | GGDGYSDSHF | VAHIKEDESEKYYVDSVKGRFTISRDNAKNSLYLQMNSLRAEDTAVYYCA |
| | | YVDSVKG | GVDV | RGGDGYSDSHFGVDVWGQGTTVTVSS |
| 1.100 | SEQ ID NO: | SEQ ID NO: | SEQ ID NO: | SEQ ID NO: 400 |
| | 397 | 398 | 399 | EVQLVESGGGLVQPGGSLRLSCAASGFTFSSHWMTWFRQAPGKGLEW |
| | SHWMT | HIKEDESEKY | GGDGYSISHFG | VAHIKEDESEKYYVDSVKGRFTISRDNAKNSLYLQMNSLRAEDTAVYYCA |
| | | YVDSVKG | VDV | RGGDGYSISHFGVDVWGQGTTVTVSS |
| 1.101 | SEQ ID NO: | SEQ ID NO: | SEQ ID NO: | SEQ ID NO: 404 |
| | 401 | 402 | 403 | EVQLVESGGGLVQPGGSLRLSCAASGFTFSSHWMTWFRQAPGKGLEW |
| | SHWMT | HIKEGGSEKY | GGDGYSDSHF | VAHIKEGGSEKYYVDSVKGRFTISRDNAKNSLYLQMNSLRAEDTAVYYCA |
| | | YVDSVKG | GVDV | RGGDGYSDSHFGVDVWGQGTTVTVSS |
| 1.102 | SEQ ID NO: | SEQ ID NO: | SEQ ID NO: | SEQ ID NO: 408 |
| | 405 | 406 | 407 | EVQLVESGGGLVQPGGSLRLSCAASGFTFSSHWMTWFRQAPGKGLEW |
| | SHWMT | HIKEEGSEKY | GGDGYSDSHF | VAHIKEEGSEKYYVDSVKGRFTISRDNAKNSLYLQMNSLRAEDTAVYYCA |
| | | YVDSVKG | GVDV | RGGDGYSDSHFGVDVWGQGTTVTVSS |
| 1.103 | SEQ ID NO: | SEQ ID NO: | SEQ ID NO: | SEQ ID NO: 412 |
| | 409 | 410 | 411 | EVQLVESGGGLVQPGGSLRLSCAASGFTFSSHWMTWFRQAPGKGLEW |
| | SHWMT | HIKEDGSEKY | GGEGYSDSHF | VAHIKEDGSEKYYVDSVKGRFTISRDNAKNSLYLQMNSLRAEDTAVYYCA |
| | | YVDSVKG | GVDV | RGGEGYSDSHFGVDVWGQGTTVTVSS |
| 1.104 | SEQ ID NO: | SEQ ID NO: | SEQ ID NO: | SEQ ID NO: 416 |
| | 413 | 414 | 415 | EVQLVESGGGLVQPGGSLRLSCAASGFTFSSHWMTWFRQAPGKGLEW |
| | SHWMT | HIKEDGSEKY | GGVGYSDSHF | VAHIKEDGSEKYYVDSVKGRFTISRDNAKNSLYLQMNSLRAEDTAVYYCA |
| | | YVDSVKG | GVDV | RGGVGYSDSHFGVDVWGQGTTVTVSS |
| 1.105 | SEQ ID NO: | SEQ ID NO: | SEQ ID NO: | SEQ ID NO: 420 |
| | 417 | 418 | 419 | EVQLVESGGGLVQPGGSLRLSCAASGFTFSSHWMTWFRQAPGKGLEW |
| | SHWMT | HIKEDESEKY | GGVGYSISHFG | VAHIKEDESEKYYVDSVKGRFTISRDNAKNSLYLQMNSLRAEDTAVYYCA |
| | | YVDSVKG | VDV | RGGVGYSISHFGVDVWGQGTTVTVSS |
| 1.106 | SEQ ID NO: | SEQ ID NO: | SEQ ID NO: | SEQ ID NO: 424 |
| | 421 | 422 | 423 | EVQLVESGGGLVQPGGSLRLSCAASGFTFSSHWMTWFRQAPGKGLEW |
| | SHWMT | HIKEDESEKY | GGEGYSISHFG | VAHIKEDESEKYYVDSVKGRFTISRDNAKNSLYLQMNSLRAEDTAVYYCA |
| | | YVDSVKG | VDV | RGGEGYSISHFGVDVWGQGTTVTVSS |
| 1.107 | SEQ ID NO: | SEQ ID NO: | SEQ ID NO: | SEQ ID NO: 428 |
| | 425 | 426 | 427 | EVQLVESGGGLVQPGGSLRLSCAASGFTLSNYWMNWVRQAPGKGLE |
| | NYWMN | NINQDGSER | GGEGYGVDHY | WVANINQDGSERYYVDSVKGRFTISRDNAKNSLYLQMSSLRAEDTAVYF |
| | | YYVDSVKG | GLDV | CARGGEGYGVDHYGLDVSGQGTTVTVSS |
| 1.108 | SEQ ID NO: | SEQ ID NO: | SEQ ID NO: | SEQ ID NO: 432 |
| | 429 | 430 | 431 | EVQLVESGGGLVQPGGSLRLSCAATGFTLSNYWMNWVRQAPGKGLE |
| | NYWMN | NINQDGSER | GGEGYGVDHY | WVANINQDGSERYYVDSVKGRFTISRDNAKNSLYLQMNSLRAEDTAVY |
| | | YYVDSVKG | GLDV | FCARGGEGYGVDHYGLDVSGQGTTVTVSS |
| 1.109 | SEQ ID NO: | SEQ ID NO: | SEQ ID NO: | SEQ ID NO: 436 |
| | 433 | 434 | 435 | EVQLVESGGGLVQPGGSLRLSCAATGFTLSNYWMNWVRQAPGKGLE |
| | NYWMN | NINQDGSER | GGEGYGVDHY | WVANINQDGSERYYVDSVKGRFTISRDNAKNSLYLQMSSLRAEDTAVYY |
| | | YYVDSVKG | GLDV | CARGGEGYGVDHYGLDVSGQGTTVTVSS |
| 1.110 | SEQ ID NO: | SEQ ID | SEQ ID NO: | SEQ ID NO: 440 |
| | 437 | NO:438 | 439 | EVQLVESGGGLVQPGGSLRLSCAASGFTLSNYWMNWVRQAPGKGLE |
| | NYWMN | NINQDGSER | GGEGYGVDHY | WVANINQDGSERYYVDSVKGRFTISRDNAKNSLYLQMNSLRAEDTAVY |
| | | YYVDSVKG | GLDV | FCARGGEGYGVDHYGLDVSGQGTTVTVSS |
| 1.111 | SEQ ID NO: | SEQ ID NO: | SEQ ID NO: | SEQ ID NO: 444 |
| | 441 | 442 | 443 | EVQLVESGGGLVQPGGSLRLSCAASGFTLSNYWMNWVRQAPGKGLE |
| | NYWMN | NINQDGSER | GGEGYGVDHY | WVANINQDGSERYYVDSVKGRFTISRDNAKNSLYLQMSSLRAEDTAVYY |
| | | YYVDSVKG | GLDV | CARGGEGYGVDHYGLDVSGQGTTVTVSS |
| 1.112 | SEQ ID NO: | SEQ ID NO: | SEQ ID NO: | SEQ ID NO: 448 |
| | 445 | 446 | 447 | EVQLVESGGGLVQPGGSLRLSCAATGFTLSNYWMNWVRQAPGKGLE |
| | NYWMN | NINQDGSER | GGEGYGVDHY | WVANINQDGSERYYVDSVKGRFTISRDNAKNSLYLQMNSLRAEDTAVY |
| | | YYVDSVKG | GLDV | YCARGGEGYGVDHYGLDVSGQGTTVTVSS |
| 1.113 | SEQ ID NO: | SEQ ID NO: | SEQ ID NO: | SEQ ID NO: 452 |
| | 449 | 450 | 451 | EVQLVESGGGLVQPGGSLRLSCAASGFTLSNYWMNWVRQAPGKGLE |
| | NYWMN | NINQDGSER | GGEGYGVDHY | WVANINQDGSERYYVDSVKGRFTISRDNAKNSLYLQMNSLRAEDTAVY |
| | | YYVDSVKG | GLDV | YCARGGEGYGVDHYGLDVSGQGTTVTVSS |
| 1.114 | SEQ ID NO: | SEQ ID NO: | SEQ ID NO: | SEQ ID NO: 456 |
| | 453 | 454 | 455 | EVQLVESGGGLVQPGGSLRLSCAASGFTLSNYWMNWVRQAPGKGLE |
| | NYWMN | NINQDESERY | GGEGYGVDHY | WVANINQDESERYYVDSVKGRFTISRDNAKNSLYLQMNSLRAEDTAVYY |
| | | YVDSVKG | GLDV | CARGGEGYGVDHYGLDVSGQGTTVTVSS |

TABLE 4
Further exemplary sequences for binding molecules that include two single variable heavy chain
domain antibodies, one that binds to CD137 and another that binds to PD-1 - Full length sequences and
CDR sequences of V_{H} single domain antibodies (Family 2) shown below

| Name | CDR1 | CDR2 | CDR3 | Full Length |
|---|---|---|---|---|
| 2.1 | SEQ ID NO: | SEQ ID NO: 458 | SEQ ID NO: 459 | SEQ ID NO: 460 |
| | 457 | YISGSGDIIDYA | EDSRLTGTTDFD | EVQLVESGGGLVKPGGSLRVSCAASGFTFSDYYMSWFRQAPGK |
| | DYYMS | DSVKG | N | GLEWVSYISGSGDIIDYADSVKGRFTISRDNAKNSLYLQMNNLR |
| | | | | AEDTAVYHCAREDSRLTGTTDFDNWGQGTLVTVSS |
| 2.2 | SEQ ID NO: | SEQ ID NO: 462 | SEQ ID NO: 463 | SEQ ID NO: 464 |
| | 461 DYYMS | YISGSGDIIDYA | EDSRIPGTTDFD | EVQLVESGGGLVKPGGSLRVSCAASGFTFSDYYMSWFRQAPGK |
| | | DSVKG | N | GLEWVSYISGSGDIIDYADSVKGRFTISRDNAKNSLYLQMNSLRA |
| | | | | EDTAVYHCAKEDSRIPGTTDFDNWGQGTLVTVSS |
| 2.3 | SEQ ID NO: | SEQ ID NO: 466 | SEQ ID NO: 467 | SEQ ID NO: 468 |
| | 465 DYYMS | YISGSGDIIDYA | EDSRIPGTTDFD | EVQLVESGGGLVKPGGSLRVSCAASGFTFSDYYMSWFRQAPGK |
| | | DSVKG | N | GLEWISYISGSGDIIDYADSVKGRFTISRDNAKNSLYLQMNSLRA |
| | | | | EDTAVYHCAKEDSRIPGTTDFDNWGQGTLVTVSS |
| 2.4 | SEQ ID NO: | SEQ ID NO: 470 | SEQ ID NO: 471 | SEQ ID NO: 472 |
| | 469 DYYMS | YISGSGDVIDYA | EDSRIPGTTDFD | EVQLVESGGGLVKPGGSLRVSCAASGFTFSDYYMSWFRQAPGK |
| | | DSVKG | N | GLEWVSYISGSGDVIDYADSVKGRFTISRDNAKNSLYLQMNSLR |
| | | | | AEDTAVYHCAKEDSRIPGTTDFDNWGQGTLVTVSS |
| 2.5 | SEQ ID NO: | SEQ ID NO: 474 | SEQ ID NO: 475 | SEQ ID NO: 476 |
| | 473 DYYMS | YISGSGDIIDYA | EDSRIPGTTDFD | EVQLVESGGGLVKPGGSLRLSCAVSGFTFSDYYMSWFRQAPGK |
| | | DSVKG | N | GLEWVSYISGSGDIIDYADSVKGRFTISRDNAKNSLYLQMNSLRA |
| | | | | EDTAVYHCAKEDSRIPGTTDFDNWGQGTLVTVSS |
| 2.6 | SEQ ID NO: | SEQ ID NO: 478 | SEQ ID NO: 479 | SEQ ID NO: 480 |
| | 477 DYYMS | YISGSGDIIDYA | EDSRIPGTTDFDS | EVQLVESGGGLVKPGGSLRVSCAASGFTFSDYYMSWFRQAPGK |
| | | DSVKG | | GLEWVSYISGSGDIIDYADSVKGRFTISRDNAKNSLYLQMNSLRA |
| | | | | EDTAVYHCAKEDSRIPGTTDFDSWGQGTMVTVSS |
| 2.7 | SEQ ID NO: | SEQ ID NO: 482 | SEQ ID NO: 483 | SEQ ID NO: 484 |
| | 481 DYYMS | YISGSGTTIDYA | EDIRMTGTTDFD | EVQLVESGGGLVKPGGSLRLSCAASGFTFSDYYMSWFRQAPGK |
| | | DSVKG | N | GLEWVSYISGSGTTIDYADSVKGRFTISRDNARNSLYLQMNSLRA |
| | | | | EDTAVYYCAREDIRMTGTTDFDNWGQGTLVTVSS |
| 2.8 | SEQ ID NO: | SEQ ID NO: | SEQ ID NO: 487 | SEQ ID NO: 488 |
| | 485 DYYMS | 486 | EDSRMPGTTDFD | EVQLVESGGGLVKPGGSLRLSCAASGFAFSDYYMSWFRQAPGK |
| | | HISGSGTTIDYA | N | GLEWVSHISGSGTTIDYADSVKGRFTISRDNAKNSLYLQMNSLR |
| | | DSVKG | | AEDTAVYHCAREDSRMPGTTDFDNWGQGTLVTVSS |
| 2.9 | SEQ ID NO: | SEQ ID NO: | SEQ ID NO: 491 | SEQ ID NO: 492 |
| | 489 DYYMT | 490 | EDSRIAGTTDFD | EVQLVESGGGLVKPGGSLRLSCAASGFTFSDYYMTWFRQAPGK |
| | | YISGSGDTIDYA | N | GLEWISYISGSGDTIDYAESVKGRFTISRDNAKNSLYLQMNSLRA |
| | | ESVKG | | EDTAVYHCAREDSRIAGTTDFDNWGPGTLVTVSS |
| 2.10 | SEQ ID NO: | SEQ ID NO: | SEQ ID NO: 495 | SEQ ID NO: 496 |
| | 493 DYYMT | 494 | EDSRLSGTTDFDY | EVQLVESGGGLVKPGGSLRLSCAASGFTFSDYYMTWFRQAPGK |
| | | YISSSGSNIDYA | | GLEWVSYISSSGSNIDYADSVKGRFTISRDNAKNSLYLQMNSLRA |
| | | DSVKG | | EDTAVYYCAREDSRLSGTTDFDYWGQGTLVTVSS |
| 2.11 | SEQ ID NO: | SEQ ID NO: | SEQ ID NO: 499 | SEQ ID NO: 500 |
| | 497 DYYMT | 498 | EDSRIAGTTDFD | EVQLVESGGGLVQPGGSLRLSCAASGFTFSDYYMTWFRQAPGK |
| | | YISGSGDTIDYA | N | GLEWISYISGSGDTIDYAESVKGRFTISRDNAKNSLYLQMNSLRA |
| | | ESVKG | | EDTAVYHCAREDSRIAGTTDFDNWGPGTLVTVSS |
| 2.12 | SEQ ID NO: | SEQ ID NO: | SEQ ID NO: 503 | SEQ ID NO: 504 |
| | 501 DYYMS | 502 | EDIRMTGTTDFD | EVQLVESGGGLVKPGGSLRLSCAASGFTFSDYYMSWFRQAPGK |
| | | HISGSGTTIDYA | H | GLEWVSHISGSGTTIDYADSVKGRFTISRDNARKSLYLQMNSLR |
| | | DSVKG | | AEDTAVYYCAREDIRMTGTTDFDHWGQGTLVTVSS |
| 2.13 | SEQ ID NO: | SEQ ID NO: | SEQ ID NO: 507 | SEQ ID NO: 508 |
| | 505 DYYMS | 506 | EDPRLPGTTDFD | QVQLVESGGGLVKPGGSLRLSCAASGFTFSDYYMSWFRQAPGK |
| | | HISSSGNTIDYA | Y | GLEWVSHISSSGNTIDYADSVKGRFTISRDNAKNSLYLQMNSLR |
| | | DSVKG | | AEDTAVYYCAREDPRLPGTTDFDYWGQGTLVTVSS |
| 2.14 | SEQ ID NO: | SEQ ID NO: | SEQ ID NO: 511 | SEQ ID NO: 512 |
| | 509 DYYMT | 510 | EDIRMPGTTDFD | EVQLVESGGGLVKPGGSLRLSCAASGFTFSDYYMTWFRQAPGK |
| | | YISGSGDTIDYA | H | GLEWISYISGSGDTIDYAESVKGRFTISRDNAKNSLYLQMNSLRA |
| | | ESVKG | | EDTAVYYCAREDIRMPGTTDFDHWGQGTLVTVSS |
| 2.15 | SEQ ID NO: | SEQ ID NO: | SEQ ID NO: 515 | SEQ ID NO: 516 |
| | 513 DYYMS | 514 | EDIRMPGTTDFD | EVQLVESGGGLVKPGGSLRLSCAVSGFTFSDYYMSWFRQAPGK |
| | | HISGSGTTIDYA | H | GLEWVSHISGSGTTIDYADSVKGRFTISRDNARNSLYLQMNSLR |
| | | DSVKG | | AEDTAVYYCAREDIRMPGTTDFDHWGQGTLVTVSS |
| 2.16 | SEQ ID NO: | SEQ ID NO: | SEQ ID NO: 519 | SEQ ID NO: 520 |
| | 517 DYYMS | 518 | EDPRLTGTTDFD | QVQLVESGGGLVKPGGSLRLSCAASGFTFSDYYMSWIRQAPGK |
| | | HISSSGSTIDYA | Y | GLEWVSHISSSGSTIDYADSVKGRFTISRDNAKNSLYLQMNSLRA |
| | | DSVKG | | EDTAVYYCAREDPRLTGTTDFDYWGQGALVTVSS |
| 2.17 | SEQ ID NO: | SEQ ID NO: | SEQ ID NO: 523 | SEQ ID NO: 524 |
| | 521 DYYMS | 522 | EDPRISGTTDFD | QVQLVESGGGLVKPGGSLRLSCAASGFTFSDYYMSWIRQAPGK |
| | | YISSSGSTISYAD | N | GLEWVSYISSSGSTISYADSVKGRFTISRDNAKNSLYLQMNSLRA |
| | | SVKG | | EDTAVYYCAREDPRISGTTDFDNWGQGTLVTVSS |
| 2.18 | SEQ ID NO: | SEQ ID NO: 526 | SEQ ID NO: 527 | SEQ ID NO: 528 |
| | 525 DYYMS | HISSSGNTIDYA | EDPRLPGTTDFD | QVQLQESGGGLVKPGGSLRLSCAASGFTFSDYYMSWFRQAPGK |
| | | DSVKG | Y | GLEWVSHISSSGNTIDYADSVKGRFTISRDNAKNSLYLQMNSLR |
| | | | | AEDTAVYYCAREDPRLPGTTDFDYWGQGTLVTVSS |
| 2.19 | SEQ ID NO: | SEQ ID NO: | SEQ ID NO: 531 | SEQ ID NO: 532 |
| | 529 DYYMS | 530 | EDPRLPGTSEFD | QVQLVESGGGLVKPGGSLRLSCAASGFTFSDYYMSWFRQAPGK |
| | | YISGTGITTDYA | N | GLEWVSYISGTGITTDYADSVKGRFTISRDNAKNSLYLQMNSLRA |
| | | DSVKG | | EDTAVYYCAREDPRLPGTSEFDNWGQGTLVTVSS |
| 2.20 | SEQ ID NO: | SEQ ID NO: | SEQ ID NO: 535 | SEQ ID NO: 536 |
| | 533 DYYMS | 534 | EDPRMPGTFDFD | EVQLVESGGGLVKPGGSLRLSCAASGFTFSDYYMSWIRQAPGK |
| | | HISSSGSTIDYA | N | GLEWVSHISSSGSTIDYADSVKGRFTISRDNAKNSLYLQMNSLRA |
| | | DSVKG | | EDTAVYYCAREDPRMPGTFDFDNWGQGTLVTVSS |
| 2.21 | SEQ ID NO: | SEQ ID NO: | SEQ ID NO: 539 | SEQ ID NO: 540 |
| | 537 DYYMS | 538 | EDIRMPGTTDFD | EVQLVESGGGLVKPGGSLRLSCAASGFAFSDYYMSWFRQAPGK |
| | | HISGSGTTIDYA | H | GLEWVSHISGSGTTIDYADSVKGRFTISRDNARNSLYLQMNSLR |
| | | DSVKG | | AEDTAVYYCAREDIRMPGTTDFDHWGQGTLVTVSS |
| 2.22 | SEQ ID NO: | SEQ ID NO: | SEQ ID NO: 543 | SEQ ID NO: 544 |
| | 541 DYYMS | 542 | EDIRMPGTTDFD | EVQLVESGGGLVKPGGSLRLSCAVSGFTFSDYYMSWFRQAPGK |
| | | HISGSGTTIDYA | H | GLEWVSHISGSGTTIDYADSVKGRFTISRDNARDSLYLQMNSLR |
| | | DSVKG | | AEDTAVYYCAREDIRMPGTTDFDHWGQGTLVTVSS |
| 2.23 | SEQ ID NO: | SEQ ID NO: | SEQ ID NO: 547 | SEQ ID NO: 548 |
| | 545 DYYMS | 546 | EDIRMPGTTDFD | EVQLVESGGGLVTPGGSLRLSCAVSGFTFSDYYMSWFRQAPGK |
| | | HISGSGTTIDYA | H | GLEWVSHISGSGTTIDYADSVKGRFTISRDNARNSLYLQMNSLR |
| | | DSVKG | | AEDTAVYYCAREDIRMPGTTDFDHWGQGTLVTVSS |
| 2.24 | SEQ ID NO: | SEQ ID NO: | SEQ ID NO: 551 | SEQ ID NO: 552 |
| | 549 DYYMS | 550 | EDIRMPGTTDFD | EVQLVESGGGLVKPGGSLRLSCAVSGFTFSDYYMSWFRQAPGK |
| | | HISGSGTTIDYA | H | GLEWVSHISGSGTTIDYADSVKGRFTISRDNARNSLYLQMNSLR |
| | | DSVKG | | AEDTAMYYCAREDIRMPGTTDFDHWGQGTLVTVSS |
| 2.25 | SEQ ID NO: | SEQ ID NO: | SEQ ID NO: 555 | SEQ ID NO: 556 |
| | 553 DYYMS | 554 | EDIRMPGTTDFD | EVQLVESGGGLVKPGGSLRLSCAASGFAFSDYYMSWFRQAPGK |
| | | HISGSGTTIDYA | H | GLEWVSHISGSGTTIDYADSVKDRFTISRDNARNSLYLQMNSLR |
| | | DSVKD | | AEDTAVYYCAREDIRMPGTTDFDHWGQGTLVTVSS |
| 2.26 | SEQ ID NO: | SEQ ID NO: | SEQ ID NO: 559 | SEQ ID NO: 560 |
| | 557 DYYMS | 558 | EDIRMPGTTDFD | EVQLVESGGGLVKPGGSLRLSCTASGFTFTDYYMSWFRQAPGK |
| | | HISSSGTTIDYA | N | GLEWVSHISSSGTTIDYADSVKGRFTISRDNAKNSLYLQMNSLRA |
| | | DSVKG | | DDTAVYYCAREDIRMPGTTDFDNWGQGTLVTVSS |
| 2.27 | SEQ ID NO: | SEQ ID NO: | SEQ ID NO: 563 | SEQ ID NO: 564 |
| | 561 DYYMT | 562 | EDIRMSGTTDFD | QVQLVESGGGLVKPGGSLRLSCAASGFTFSDYYMTWFRQAPGK |
| | | YISSSGSTISYAD | Y | GLEWVSYISSSGSTISYADSVKGRFTISRDNANNSLYLQMNSLRA |
| | | SVKG | | EDTAVYHCAREDIRMSGTTDFDYWGQGTLVTVSS |
| 2.28 | SEQ ID NO: | SEQ ID NO: | SEQ ID NO: 567 | SEQ ID NO: 568 |
| | 565 DYYMS | 566 | EDPRLSGTIDFDS | QVQLVESGGGLVKPGGSLRLSCAASGFIFSDYYMSWFRQAPGK |
| | | HISSSGSSIDYA | | GLEWVSHISSSGSSIDYADSVKGRFTISRDNAKNSLYLQMNSLRA |
| | | DSVKG | | EDTAVYYCAREDPRLSGTIDFDSWGQGTLVTVSS |
| 2.29 | SEQ ID NO: | SEQ ID NO: | SEQ ID NO: 571 | SEQ ID NO: 572 |
| | 569 DYYMS | 570 | EDIRMPGTTDFD | EVQLVESGGGLVKPGGSLRLSCAASGFAFSDYYMSWFRQAPGK |
| | | HIGGSGTTIDYA | H | GLEWVSHIGGSGTTIDYADSVKGRFTISRDNARNSLYLQMNSLR |
| | | DSVKG | | AEDTAVYYCAREDIRMPGTTDFDHWGQGTLVTVSS |
| 2.30 | SEQ ID NO: | SEQ ID NO: | SEQ ID NO: 575 | SEQ ID NO: 576 |
| | 573 DYYMS | 574 | EDPRVPGTTNFD | QVQLVESGGGLVKPGGSLRLSCAASGFTFSDYYMSWIRQAPGK |
| | | YISSSGSTIYYAD | Y | GLEWVSYISSSGSTIYYADSVKGRFTISRDNAKNSLYLQMNSLRA |
| | | SVKG | | EDTAVYYCAREDPRVPGTTNFDYWGQGTLVTVSS |
| 2.31 | SEQ ID NO: | SEQ ID NO: | SEQ ID NO: 579 | SEQ ID NO: 580 |
| | 577 DYYMT | 578 | EDGRIPGTTDFD | QVQLVESGGGLVKPGGSLRLSCAASGFTFSDYYMTWMRQAPG |
| | | YISGSGSTIDYA | H | KGLEWVSYISGSGSTIDYADSVKGRFTISRDNAKNSLYLQMNSLR |
| | | DSVKG | | PEDTAVYYCAKEDGRIPGTTDFDHWGQGTLVTVSS |
| 2.32 | SEQ ID NO: | SEQ ID NO: | SEQ ID NO: 583 | SEQ ID NO: 584 |
| | 581 DYYMS | 582 | EDIRMPGTTDFD | EVQLVESGGGLVQPGGSLRLSCAASGFAFSDYYMSWFRQAPGK |
| | | HISGSGTTIDYA | H | GLEWVSHISGSGTTIDYADSVKDRFTISRDNARNSLYLQMNSLR |
| | | DSVKD | | AEDTAVYYCAREDIRMPGTTDFDHWGQGTLVTVSS |
| 2.33 | SEQ ID NO: | SEQ ID NO: | SEQ ID NO: 587 | SEQ ID NO: 588 |
| | 585 DYFMS | 586 | EDPRLPGTTDFD | QVQLVESGGGLVKPGGSLRLSCAASGFPFSDYFMSWFRQAPGK |
| | | HISSSGNSIDYA | Y | GLEWVSHISSSGNSIDYADSVKGRFTISRDNAKNSLYLQMNSLR |
| | | DSVKG | | AEDTAVYYCAKEDPRLPGTTDFDYWGQGTLVTVSS |
| 2.34 | SEQ ID NO: | SEQ ID NO: | SEQ ID NO: 591 | SEQ ID NO: 592 |
| | 589 DSYMS | 590 | EDPRLPGTSDFD | QVQLVESGGGLVKPGGSLRLSCAASGFTFSDSYMSWIRQAPGK |
| | | HISNSGSTISYA | Y | GLEWVSHISNSGSTISYADSVKGRFTISRDNAKNSLYLQMNSLRA |
| | | DSVKG | | EDTAVYYCAREDPRLPGTSDFDYWGQGTLVTVSS |
| 2.35 | SEQ ID NO: | SEQ ID NO: | SEQ ID NO: 595 | SEQ ID NO: 596 |
| | 593 DYYMS | 594 | EDPRLSGTTDFD | QVQLVESGGGVVQPGRSLRLSCAASGFTFSDYYMSWIRQAPGK |
| | | HISSSGSSIDYA | Q | GLEWVSHISSSGSSIDYADSVKGRFTISRDNAKNSLYLQMNSLRD |
| | | DSVKG | | EDTAVYYCAREDPRLSGTTDFDQWGQGTLVTVSS |
| 2.36 | SEQ ID NO: | SEQ ID NO: | SEQ ID NO: 599 | SEQ ID NO: 600 |
| | 597 SYWMS | 598 | EDPRMTGTTDFD | QVQLVESGGGLVQPGGSLRLSCAASGFTFSSYWMSWVRQAPG |
| | | HISSSGSTIDYAE | Y | KGLEWVSHISSSGSTIDYAESVKGRFTISRDNAKNSLYLQMNSLR |
| | | SVKG | | AEDTAVYYCAREDPRMTGTTDFDYWGQGTLVTVSS |
| 2.37 | SEQ ID NO: | SEQ ID NO: | SEQ ID NO: 603 | SEQ ID NO: 604 |
| | 601 NYFMS | 602 | EDPRLPGTTDFD | QVQLQESGGGLVKPGGSLRLSCAASGFTFSNYFMSWIRQAPGK |
| | | HISSSGNTIDYA | Y | GLEWVSHISSSGNTIDYADSVKGRFTISRDNAKNSLYLQMDSLR |
| | | DSVKG | | AEDTAVYYCSREDPRLPGTTDFDYWGQGTLVTVSS |
| 2.38 | SEQ ID NO: | SEQ ID NO: | SEQ ID NO: 607 | SEQ ID NO: 608 |
| | 605 DYYMT | 606 | ENPRLPGTMDFD | EVQLVESGGGVVKPGGSLRLSCAASGFTFSDYYMTWIRQGPGK |
| | | YISSGGSTIHYA | Y | GQEWISYISSGGSTIHYADSVKGRFTISRDNAKNSLYLQMNSLRA |
| | | DSVKG | | EDTAVYYCARENPRLPGTMDFDYWGQGTLVTVSS |
| 2.39 | SEQ ID NO: | SEQ ID NO: | SEQ ID NO: 611 | SEQ ID NO: 612 |
| | 609 DHFMS | 610 | EDPRLTGTTDFD | QVQLVESGGGLVQPGGSLRLSCAASGFTFSDHFMSWFRQAPG |
| | | NIKQDGSEKYY | N | KGLEWVANIKQDGSEKYYVDSVKGRFTISRDNAKNSLFLQMNSL |
| | | VDSVKG | | RAEDTAMYYCAREDPRLTGTTDFDNWGQGTLVTVSS |
| 2.40 | SEQ ID NO: | SEQ ID NO: | SEQ ID NO: 615 | SEQ ID NO: 616 |
| | 613 NYWMT | 614 | EDPRLPGTMDFD | EVQLVESGGGLVQAGGSLRLSCVASGFTFSNYWMTWFRQAPG |
| | | HISSTGSTIDYA | Y | RGLEWVSHISSTGSTIDYADSVKGRFTISRDNAENSLYLQMNSLR |
| | | DSVKG | | AEDTAVYYCAREDPRLPGTMDFDYWGQGTLVTVSS |
| 2.41 | SEQ ID NO: | SEQ ID NO: | SEQ ID NO: 619 | SEQ ID NO: 620 |
| | 617 DYYMS | 618 | EDSRLTGTTDFD | EVQLVESGGGLVKPGGSLRLSCAASGFTFSDYYMSWFRQAPGK |
| | | YISGSGDIIDYA | N | GLEWVSYISGSGDIIDYADSVKGRFTISRDNAKNSLYLQMNNLR |
| | | DSVKG | | AEDTAVYHCAREDSRLTGTTDFDNWGQGTLVTVSS |
| 2.42 | SEQ ID NO: | SEQ ID NO: 622 | SEQ ID NO: 623 | SEQ ID NO:624 |
| | 621 DYYMS | YISGSGDIIDYA | EDSRLTGTTDFD | EVQLVESGGGLVKPGGSLRVSCAASGFTFSDYYMSWIRQAPGK |
| | | DSVKG | N | GLEWVSYISGSGDIIDYADSVKGRFTISRDNAKNSLYLQMNNLR |
| | | | | AEDTAVYHCAREDSRLTGTTDFDNWGQGTLVTVSS |
| 2.43 | SEQ ID NO: | SEQ ID NO: 626 | SEQ ID NO: 627 | SEQ ID NO: 628 |
| | 625 | YISGSGDIIDYA | EDSRLTGTTDFD | EVQLVESGGGLVKPGGSLRVSCAASGFTFSDYYMSWFRQAPGK |
| | DYYMS | DSVKG | N | GLEWVSYISGSGDIIDYADSVKGRFTISRDNAKNSLYLQMNNLR |
| | | | | AEDTAVYYCAREDSRLTGTTDFDNWGQGTLVTVSS |
| 2.44 | SEQ ID NO: | SEQ ID NO: 630 | SEQ ID NO: 631 | SEQ ID NO: 632 |
| | 629 | YISGSGDIIDYA | EDSRLTGTTDFD | EVQLVESGGGLVKPGGSLRVSCAASGFTFSDYYMSWFRQAPGK |
| | DYYMS | DSVKG | N | GLEWVSYISGSGDIIDYADSVKGRFTISRDNAKNSLYLQMNSLRA |
| | | | | EDTAVYHCAREDSRLTGTTDFDNWGQGTLVTVSS |
| 2.45 | SEQ ID NO: | SEQ ID NO: 634 | SEQ ID NO: 635 | SEQ ID NO: 636 |
| | 633 | YISGSGDIIDYA | EDSRLTGTTDFD | EVQLVESGGGLVKPGGSLRLSCAASGFTFSDYYMSWFRQAPGK |
| | DYYMS | DSVKG | N | GLEWVSYISGSGDIIDYADSVKGRFTISRDNAKNSLYLQMNNLR |
| | | | | AEDTAVYYCAREDSRLTGTTDFDNWGQGTLVTVSS |
| 2.46 | SEQ ID NO: | SEQ ID NO: 638 | SEQ ID NO: 639 | SEQ ID NO: 640 |
| | 637 | YISGSGDIIDYA | EDSRLTGTTDFD | EVQLVESGGGLVKPGGSLRLSCAASGFTFSDYYMSWIRQAPGK |
| | DYYMS | DSVKG | N | GLEWVSYISGSGDIIDYADSVKGRFTISRDNAKNSLYLQMNSLRA |
| | | | | EDTAVYYCAREDSRLTGTTDFDNWGQGTLVTVSS |
| 2.47 | SEQ ID NO: | SEQ ID NO: 642 | SEQ ID NO: 643 | SEQ ID NO: 644 |
| | 641 | YISGSGDIIDYA | EDSRLTGTTDFD | EVQLVESGGGLVKPGGSLRLSCAASGFTFSDYYMSWFRQAPGK |
| | DYYMS | DSVKG | N | GLEWVSYISGSGDIIDYADSVKGRFTISRDNAKNSLYLQMNSLRA |
| | | | | EDTAVYYCAREDSRLTGTTDFDNWGQGTLVTVSS |
| 2.48 | SEQ ID NO: | SEQ ID NO: 646 | SEQ ID NO: 647 | SEQ ID NO: 648 |
| | 645 | YISGSGDIIDYA | EDARLTGTTDFD | EVQLVESGGGLVKPGGSLRLSCAASGFTFSDYYMSWIRQAPGK |
| | DYYMS | DSVKG | N | GLEWVSYISGSGDIIDYADSVKGRFTISRDNAKNSLYLQMNSLRA |
| | | | | EDTAVYYCAREDARLTGTTDFDNWGQGTLVTVSS |
| 2.49 | SEQ ID NO: | SEQ ID NO: 650 | SEQ ID NO: 651 | SEQ ID NO: 652 |
| | 649 | YISGSGDIIDYA | EDPRLTGTTDFD | EVQLVESGGGLVKPGGSLRLSCAASGFTFSDYYMSWIRQAPGK |
| | DYYMS | DSVKG | N | GLEWVSYISGSGDIIDYADSVKGRFTISRDNAKNSLYLQMNSLRA |
| | | | | EDTAVYYCAREDPRLTGTTDFDNWGQGTLVTVSS |
| 2.50 | SEQ ID NO: | SEQ ID NO: 654 | SEQ ID NO: 655 | SEQ ID NO: 656 |
| | 653 | YISGSGDIIDYA | EDARLTGTTDFD | EVQLVESGGGLVKPGGSLRLSCAASGFTFSDYYMSWFRQAPGK |
| | DYYMS | DSVKG | N | GLEWVSYISGSGDIIDYADSVKGRFTISRDNAKNSLYLQMNSLRA |
| | | | | EDTAVYYCAREDARLTGTTDFDNWGQGTLVTVSS |
| 2.51 | SEQ ID NO: | SEQ ID NO: 658 | SEQ ID NO: 659 | SEQ ID NO: 660 |
| | 657 | YISGSGDIIDYA | EDPRLTGTTDFD | EVQLVESGGGLVKPGGSLRLSCAASGFTFSDYYMSWFRQAPGK |
| | DYYMS | DSVKG | N | GLEWVSYISGSGDIIDYADSVKGRFTISRDNAKNSLYLQMNSLRA |
| | | | | EDTAVYYCAREDPRLTGTTDFDNWGQGTLVTVSS |

[0160] In one embodiment, the binding molecule that binds to CD137 and PD-1 comprises one or more single domain antibodies that bind to CD137, for example a single domain antibody selected from shown in any of in Tables 2, 3 and 4 or a sequence with at least 70%, 80&, 85%, 90%, 95% sequence homology thereto. In some embodiments, single domain antibody is a variant of any of the above single V_{H} domain antibodies shown in Table 2, 3 and 4 having one or more amino acid substitutions, deletions, insertions or other modifications, and which retains a biological function of the single domain antibody. Thus, variant V_{H} single domain antibodies can be sequence engineered. Modifications are described elsewhere herein. In one embedment, there is provided a variant of V_{Hs} 1.07 to 1.113, for example V_{H}1.113 which has 1, 2, 3, 4, 5, 6, 7, 8, 9 or 10 substitutions.

### Examples of Substitutions

[0161] In one embodiment, the variant comprises one or more the following substitutions with reference to V_{H}1.1 or combinations thereof:
[0162] F37V
[0163] E61V+E65K
[0164] E65K
[0165] V70I
[0166] V79L
[0167] F37V+E61V+E65K+V70I+V79L
[0168] E61V+E65K+V70I+V79L
[0169] F37V+E61V+E65K+V70I+V79L+G55E+D101V+D105I
[0170] F37V+E61V+E65K+V70I+V79LFGL+G55E+D101E+D105I
[0171] E61V+E65K+V70I+V79L+G55E
[0172] E61V+E65K+V70I+V79L+G55E+D105I
[0173] E61V+E65K+V70I+V79L+D54G, E61V+E65K+V70I+V79L+D54E,
[0174] E61V+E65K+V70I+V79L+D101E
[0175] E61V+E65K+V70I+V79L+D101V or
[0176] E61V+E65K+V70I+V79L+G55E+D101V+D105I, E61V+E65K+V70I+V79L+G55E+D101E+D105I

[0177] In one embodiment, the variant comprises one or more the following substitutions with reference to V_{H}1.1 or combinations thereof:

a) E61V+E65K+V70I+V79L+G55E+D101→any amino acid selected from the following F, L, I, M, V, S, P, T, A, Y, H, Q, K, D, W, R, G;
b) E61V+E65K+V70I+V79L+G55E+D105→any amino acid selected from the following F, L, M, S, P, T, A, Y, H, Q, N, K, D, E, W, R, G or
c) E61V+E65K+V70I+V79L+G55E, D101→any amino acid selected from the following F, L, I, M, V, S, P, T, A, Y, H, Q, K, D, W, R, G+D105→any amino acid selected from the following F, L, M, S, P, T, A, Y, H, Q, N, K, D, E, W, R, G.

[0178] In one embodiment, the variant comprises one or more the following substitutions with reference to V_{H}1.78 or combinations thereof:
[0179] Q1E+T25S
[0180] Q1E+S84N
[0181] Q1E+F95Y
[0182] Q1E+T25S+S84N
[0183] Q1E+T25S+F95Y
[0184] Q1E+S84N+F95Y
[0185] Q1E+T25S+S84N+F95Y or
[0186] Q1E+T25S+G55E+S84N+F95Y

[0187] In one embodiment, the variant comprises one or more the following substitutions with reference to V_{H}2.1 or combinations thereof:
[0188] V20L,
[0189] F37I,
[0190] N85S,
[0191] N95Y,
[0192] V20L+H95Y,
[0193] V20L+F37I+N85S+H95Y, V20L+N85S+H95Y,
[0194] V20L+F37I+N85S+H95Y+S101A,
[0195] V20L+F37I+N85S+H95Y+S101P or
[0196] V20L+N85S+H95Y+S101A, V20L+N85S+H95Y+S101A.

[0197] In one embodiment, the variant comprises one or more the following substitutions with reference to V_{H}2.50 or combinations thereof:
[0198] S35T+V48I+I57T+L103M+T104R+T107I
[0199] S35T+A101T+L103V+T104R+T107V
[0200] S35T+V48I+I57T+A101E+L103L+T104W+T107V
[0201] S35T+V48I+L103T+T104R+T107V
[0202] Y32H+S35T+V48I+S52G+S54D+D56A+I58L+A101L+T104P+T107I+N111H
[0203] S35T+A101T+L103V+T104R+T107V+N111S
[0204] A28T+S30T+Y33W+S35T+V48I+G53S+S54D+D56K+I57T+L103M+T104P+T107I+N111Y
[0205] S35T+V48I+L103T+T104R+T107V+N111S
[0206] S35T+V48I+I57T+S101E+T104W+T107V+N111S or
[0207] S35T+V48I+I57T+L103M+T104R+T107I+N111S

### Exemplary Nucleic Acids Encoding CD137 Polypeptide

[0208] An isolated nucleic acid encoding a single domain antibody as shown above is set out below. Nucleic acid may include DNA and/or RNA. In one aspect, the present invention provides a nucleic acid that codes for a CDR, for example CDR3, a set of two or three CDRs or a V_{H} single domain antibody of the invention as shown above. Exemplary sequences are shown in SEQ ID Nos 661 to 774 and 775 to 825.

TABLE 5
Nucleic acids encoding V_{H} 1.1 to 1.114 as shown in Table 4

| Name | Nucleotide Sequence |
|---|---|
| 1.1 | SEQ ID NO: 661 |
| 1.2 | SEQ ID NO: 662 |
| 1.3 | SEQ ID NO: 663 |
| 1.4 | SEQ ID NO: 664 |
| 1.5 | SEQ ID NO: 665 |
| 1.6 | SEQ ID NO: 666 |
| 1.7 | SEQ ID NO: 667 |
| 1.8 | SEQ ID NO: 668 |
| 1.9 | SEQ ID NO: 669 |
| 1.10 | SEQ ID NO: 670 |
| 1.11 | SEQ ID NO: 671 |
| 1.12 | SEQ ID NO: 672 |
| 1.13 | SEQ ID NO: 673 |
| 1.14 | SEQ ID NO: 674 |
| 1.15 | SEQ ID NO: 675 |
| 1.16 | SEQ ID NO: 676 |
| 1.17 | SEQ ID NO: 677 |
| 1.18 | SEQ ID NO: 678 |
| 1.19 | SEQ ID NO: 679 |
| 1.20 | SEQ ID NO: 680 |
| 1.21 | SEQ ID NO: 681 |
| 1.22 | SEQ ID NO: 682 |
| 1.23 | SEQ ID NO: 683 |
| 1.24 | SEQ ID NO: 684 |
| 1.25 | SEQ ID NO: 685 |
| 1.26 | SEQ ID NO: 686 |
| 1.27 | SEQ ID NO: 687 |
| 1.28 | SEQ ID NO: 688 |
| 1.29 | SEQ ID NO: 689 |
| 1.30 | SEQ ID NO: 690 |
| 1.31 | SEQ ID NO: 691 |
| 1.32 | SEQ ID NO: 692 |
| 1.33 | SEQ ID NO: 693 |
| 1.34 | SEQ ID NO: 694 |
| 1.35 | SEQ ID NO: 695 |
| 1.36 | SEQ ID NO: 696 |
| 1.37 | SEQ ID NO: 697 |
| 1.38 | SEQ ID NO: 698 |
| 1.39 | SEQ ID NO: 699 |
| 1.40 | SEQ ID NO: 700 |
| 1.41 | SEQ ID NO: 701 |
| 1.42 | SEQ ID NO: 702 |
| 1.43 | SEQ ID NO: 703 |
| 1.44 | SEQ ID NO: 704 |
| 1.45 | SEQ ID NO: 705 |
| 1.46 | SEQ ID NO: 706 |
| 1.47 | SEQ ID NO: 707 |
| 1.48 | SEQ ID NO: 708 |
| 1.49 | SEQ ID NO: 709 |
| 1.50 | SEQ ID NO: 710 |
| 1.51 | SEQ ID NO: 711 |
| 1.52 | SEQ ID NO: 712 |
| 1.53 | SEQ ID NO: 713 |
| 1.54 | SEQ ID NO: 714 |
| 1.55 | SEQ ID NO: 715 |
| 1.56 | SEQ ID NO: 716 |
| 1.57 | SEQ ID NO: 717 |
| 1.58 | SEQ ID NO: 718 |
| 1.59 | SEQ ID NO: 719 |
| 1.60 | SEQ ID NO: 720 |
| 1.61 | SEQ ID NO: 721 |
| 1.62 | SEQ ID NO: 722 |
| 1.63 | SEQ ID NO: 723 |
| 1.64 | SEQ ID NO: 724 |
| 1.65 | SEQ ID NO: 725 |
| 1.66 | SEQ ID NO: 726 |
| 1.67 | SEQ ID NO: 727 |
| 1.68 | SEQ ID NO: 728 |
| 1.69 | SEQ ID NO: 729 |
| 1.70 | SEQ ID NO: 730 |
| 1.71 | SEQ ID NO: 731 |
| 1.72 | SEQ ID NO: 732 |
| 1.73 | SEQ ID NO: 733 |
| 1.74 | SEQ ID NO: 734 |
| 1.75 | SEQ ID NO: 735 |
| 1.76 | SEQ ID NO: 736 |
| 1.77 | SEQ ID NO: 737 |
| 1.78 | SEQ ID NO: 738 |
| 1.79 | SEQ ID NO: 739 |
| 1.80 | SEQ ID NO: 740 |
| 1.81 | SEQ ID NO: 741 |
| 1.82 | SEQ ID NO: 742 |
| 1.83 | SEQ ID NO: 743 |
| 1.84 | SEQ ID NO: 744 |
| 1.85 | SEQ ID NO: 745 |
| 1.86 | SEQ ID NO: 746 |
| 1.87 | SEQ ID NO: 747 |
| 1.88 | SEQ ID NO: 748 |
| 1.89 | SEQ ID NO: 749 |
| 1.90 | SEQ ID NO: 750 |
| 1.91 | SEQ ID NO: 751 |
| 1.92 | SEQ ID NO: 752 |
| 1.93 | SEQ ID NO: 753 |
| 1.94 | SEQ ID NO: 754 |
| 1.95 | SEQ ID NO: 755 |
| 1.96 | SEQ ID NO: 756 |
| 1.97 | SEQ ID NO: 757 |
| 1.98 | SEQ ID NO: 758 |
| 1.99 | SEQ ID NO: 759 |
| 1.100 | SEQ ID NO: 760 |
| 1.101 | SEQ ID NO: 761 |
| 1.102 | SEQ ID NO: 762 |
| 1.103 | SEQ ID NO: 763 |
| 1.104 | SEQ ID NO: 764 |
| 1.105 | SEQ ID NO: 765 |
| 1.106 | SEQ ID NO: 766 |
| 1.107 | SEQ ID NO: 767 |
| 1.108 | SEQ ID NO: 768 |
| 1.109 | SEQ ID NO: 769 |
| 1.110 | SEQ ID NO: 770 |
| 1.111 | SEQ ID NO: 771 |
| 1.112 | SEQ ID NO: 772 |
| 1.113 | SEQ ID NO: 773 |
| 1.114 | SEQ ID NO: 774 |

TABLE 6
Nucleic acids encoding V_{H} 2.1 to 2.51 as shown in table 4

| Name | Nucleotide Sequence |
|---|---|
| 2.1 | SEQ ID NO: 775 |
| 2.2 | SEQ ID NO: 776 |
| 2.3 | SEQ ID NO: 777 |
| 2.4 | SEQ ID NO: 778 |
| 2.5 | SEQ ID NO: 779 |
| 2.6 | SEQ ID NO: 780 |
| 2.7 | SEQ ID NO: 781 |
| 2.8 | SEQ ID NO: 782 |
| 2.9 | SEQ ID NO: 783 |
| 2.10 | SEQ ID NO: 784 |
| 2.11 | SEQ ID NO: 785 |
| 2.12 | SEQ ID NO: 786 |
| 2.13 | SEQ ID NO: 787 |
| 2.14 | SEQ ID NO: 788 |
| 2.15 | SEQ ID NO: 789 |
| 2.16 | SEQ ID NO: 790 |
| 2.17 | SEQ ID NO: 791 |
| 2.18 | SEQ ID NO: 792 |
| 2.19 | SEQ ID NO: 793 |
| 2.20 | SEQ ID NO: 794 |
| 2.21 | SEQ ID NO: 795 |
| 2.22 | SEQ ID NO: 796 |
| 2.23 | SEQ ID NO: 797 |
| 2.24 | SEQ ID NO: 798 |
| 2.25 | SEQ ID NO: 799 |
| 2.26 | SEQ ID NO: 800 |
| 2.27 | SEQ ID NO: 801 |
| 2.28 | SEQ ID NO: 802 |
| 2.29 | SEQ ID NO: 803 |
| 2.30 | SEQ ID NO: 804 |
| 2.31 | SEQ ID NO: 805 |
| 2.32 | SEQ ID NO: 806 |
| 2.33 | SEQ ID NO: 807 |
| 2.34 | SEQ ID NO: 808 |
| 2.35 | SEQ ID NO: 809 |
| 2.36 | SEQ ID NO: 810 |
| 2.37 | SEQ ID NO: 811 |
| 2.38 | SEQ ID NO: 812 |
| 2.39 | SEQ ID NO: 813 |
| 2.40 | SEQ ID NO: 814 |
| 2.41 | SEQ ID NO: 815 |
| 2.42 | SEQ ID NO: 816 |
| 2.43 | SEQ ID NO: 817 |
| 2.44 | SEQ ID NO: 818 |
| 2.45 | SEQ ID NO: 819 |
| 2.46 | SEQ ID NO: 820 |
| 2.47 | SEQ ID NO: 821 |
| 2.48 | SEQ ID NO: 822 |
| 2.49 | SEQ ID NO: 823 |
| 2.50 | SEQ ID NO: 824 |
| 2.51 | SEQ ID NO: 825 |

[0209] In one embodiment, the nucleic acid sequence has at least 50% sequence homology to one of the sequences selected above. In one embodiment, said sequence homology is at least 50%, 60%, 70%, 71%, 72%, 73%, 74%, 75%, 76%, 77%, 78%, 79%, 80%, 81%, 82%, 83%, 84%, 85%, 86%, 87%, 88%, 89%, 90%, 91%, 92%, 93%, 94%, 95%, 96%, 97%, 98% or 99%.

Novel Single Variable Heavy Chain Domain Antibodies that Bind to CD137

[0210] Whilst the CD137 binding single domain antibodies described above are used as building blocks for multispecific molecules that bind to both, CD137 and PD-1, in accordance with this invention we also provide novel single variable heavy chain domain antibodies that bind to CD137. These can be used as building blocks for multispecific molecules that bind to CD137 and a second target, such as both, CD137 and PD-1 or CD137 and PSMA as shown herein. These molecules bind to CD137, but do not cause CD137 signalling when bound to CD137 in monospecific format, that is without being linked to another moiety that binds a second target. The dual engagement of CD137 and, for example, a tumor specific antigen in a bispecific molecule leads to CD137 agonism. The isolated single variable heavy chain domain antibody binds to human CD137 but does not elicit CD137 signalling when bound to CD137 as a monospecific entity. In one embodiment, said single variable heavy chain domain antibody inhibits the binding of CD137L to CD137.

[0211] In one embodiment, the single variable heavy chain domain antibody comprises a CDR1 sequence selected from table 7 or a sequence with at least 75%, v homology/identity thereto, a CDR2 sequence selected from table 7 or a sequence with at least 75%, 80%, 90% or 95% homology/identity thereto and a CDR3 sequence selected from table 7 or a sequence with at least 75% homology/identity thereto. In one embodiment, the single variable heavy chain domain antibody comprises a full length sequence as shown in table 7 or a sequence with at least 75%, 80%, 90% or 95% homology/identity thereto. In one embodiment, the single variable heavy chain domain antibody comprises a set of CDR1, 2, and 3 sequences as shown for V_{H} single domain antibodies as shown in table 7 or a sequence with at least 75%, 80%, 90% or 95% sequence homology thereto. Thus, in one embodiment, the V_{H} single domain antibody has a CDR1 with SEQ ID NO. 850 or a sequence with at least 75%, 80%, 90% or 95% sequence homology thereto, a CDR2 with SEQ ID NO. 851 or a sequence with at least 75%, 80%, 90% or 95% sequence homology thereto and a CDR3 with SEQ ID NO. 852 or a sequence with at least 75%, 80%, 90% or 95% sequence homology thereto. In another embodiment, the V_{H} single domain antibody has a CDR1 with SEQ ID NO. 854 or a sequence with at least 75%, 80%, 90% or 95% sequence homology thereto, a CDR2 with SEQ ID NO. 855 and a CDR3 with SEQ ID NO. 856 or a sequence with at least 75%, 80%, 90% or 95% sequence homology thereto and so forth.

[0212] In one embodiment, the V_{H} comprises a CDR1, 2 and/or 3 sequence as shown for 003BB172-E01-13 in Table 7. In one embodiment, the V_{H} comprises sequence as shown for the full V_{H} sequence for 003BB172-E01-13 in Table 7. In one embodiment, the V_{H} is a variant of 003BB172-E01-13 that has a substitution at one or more of the positions L11V, G16R, R44G, M78T, T84N, T88A. In one embodiment, the variant is as shown in Table 7.

TABLE 7

| NAME | CDR1 | CDR2 | CDR3 | Full VH Sequence |
|---|---|---|---|---|
| 003BB1 | SEQ ID NO: | SEQ ID NO: | SEQ ID NO: | SEQ ID NO: 829 |
| 72-E01 | 826 | 827 | 828 | EVQLVESGGGLVQPGGSLRLSCAASGFTFSNYGMHWVRQA |
| | NYGMH | VISNDGNTKTY | DETTTVTAS | PGKRLEWVAVISNDGNTKTYADSVKGRFTISRDNSKNMLYLQ |
| | | ADSVKG | YYFDY | MTSLRTEDTAVYYCAQDETTTVTASYYFDYWGQGTLVTVSS |
| 003BB1 | SEQ ID NO: | SEQ ID NO: | SEQ ID NO: | SEQ ID NO: 833 |
| 72-E01- | 830 | 831 | 832 | EVQLVESGGGLVQPGGSLRLSCAASGFTFSNYGMHWVRQA |
| 1 | NYGMH | VISNDGNTKTY | DETTTVTAS | PGKGLEWVAVISNDGNTKTYADSVKGRFTISRDNSKNMLYL |
| | | ADSVKG | YYFDY | QMTSLRTEDTAVYYCAQDETTTVTASYYFDYWGQGTLVTVS |
| | | | | S |
| 003BB1 | SEQ ID NO: | SEQ ID NO: | SEQ ID NO: | SEQ ID NO: 837 |
| 72-E01- | 834 | 835 | 836 | EVQLVESGGGLVQPGGSLRLSCAASGFTFSNYGMHWVRQA |
| 2 | NYGMH | VISNDGNTKTY | DETTTVTAS | PGKRLEWVAVISNDGNTKTYADSVKGRFTISRDNSKNTLYLQ |
| | | ADSVKG | YYFDY | MTSLRTEDTAVYYCAQDETTTVTASYYFDYWGQGTLVTVSS |
| 003BB1 | SEQ ID NO: | SEQ ID NO: | SEQ ID NO: | SEQ ID NO: 841 |
| 72-E01- | 838 | 839 | 840 | EVQLVESGGGLVQPGGSLRLSCAASGFTFSNYGMHWVRQA |
| 3 | NYGMH | VISNDGNTKTY | DETTTVTAS | PGKRLEWVAVISNDGNTKTYADSVKGRFTISRDNSKNMLYLQ |
| | | ADSVKG | YYFDY | MNSLRTEDTAVYYCAQDETTTVTASYYFDYWGQGTLVTVSS |
| 003BB1 | SEQ ID NO: | SEQ ID NO: | SEQ ID NO: | SEQ ID NO: 845 |
| 72-E01- | 842 | 843 | 844 | EVQLVESGGGLVQPGGSLRLSCAASGFTFSNYGMHWVRQA |
| 4 | NYGMH | VISNDGNTKTY | DETTTVTAS | PGKGLEWVAVISNDGNTKTYADSVKGRFTISRDNSKNTLYLQ |
| | | ADSVKG | YYFDY | MTSLRTEDTAVYYCAQDETTTVTASYYFDYWGQGTLVTVSS |
| 003BB1 | SEQ ID NO: | SEQ ID NO: | SEQ ID NO: | SEQ ID NO: 849 |
| 72-E01- | 846 | 847 | 848 | EVQLVESGGGLVQPGGSLRLSCAASGFTFSNYGMHWVRQA |
| 5 | NYGMH | VISNDGNTKTY | DETTTVTAS | PGKRLEWVAVISNDGNTKTYADSVKGRFTISRDNSKNTLYLQ |
| | | ADSVKG | YYFDY | MNSLRTEDTAVYYCAQDETTTVTASYYFDYWGQGTLVTVSS |
| 003BB1 | SEQ ID NO: | SEQ ID NO: | SEQ ID NO: | SEQ ID NO: 853 |
| 72-E01- | 850 | 851 | 852 | EVQLVESGGGLVQPGGSLRLSCAASGFTFSNYGMHWVRQA |
| 6 | NYGMH | VISNDGNTKTY | DETTTVTAS | PGKGLEWVAVISNDGNTKTYADSVKGRFTISRDNSKNMLYL |
| | | ADSVKG | YYFDY | QMNSLRTEDTAVYYCAQDETTTVTASYYFDYWGQGTLVTVS |
| | | | | S |
| 003BB1 | SEQ ID NO: | SEQ ID NO: | SEQ ID NO: | SEQ ID NO: 857 |
| 72-E01- | 854 | 855 | 856 | EVQLVESGGGLVQPGGSLRLSCAASGFTFSNYGMHWVRQA |
| 7 | NYGMH | VISNDGNTKTY | DETTTVTAS | PGKGLEWVAVISNDGNTKTYADSVKGRFTISRDNSKNTLYLQ |
| | | ADSVKG | YYFDY | MNSLRTEDTAVYYCAQDETTTVTASYYFDYWGQGTLVTVSS |
| 003BB1 | SEQ ID NO: | SEQ ID NO: | SEQ ID NO: | SEQ ID NO: 861 |
| 72-E01- | 858 | 859 | 860 | EVQLVESGGGVVQPGGSLRLSCAASGFTFSNYGMHWVRQA |
| 8 | NYGMH | VISNDGNTKTY | DETTTVTAS | PGKGLEWVAVISNDGNTKTYADSVKGRFTISRDNSKNTLYLQ |
| | | ADSVKG | YYFDY | MNSLRTEDTAVYYCAQDETTTVTASYYFDYWGQGTLVTVSS |
| 003BB1 | SEQ ID NO: | SEQ ID NO: | SEQ ID NO: | SEQ ID NO: 865 |
| 72-E01- | 862 | 863 | 864 | EVQLVESGGGLVQPGGSLRLSCAASGFTFSNYGMHWVRQA |
| 9 | NYGMH | VISNDGNTKTY | DETTTVTAS | PGKGLEWVAVISNDGNTKTYADSVKGRFTISRDNSKNTLYLQ |
| | | ADSVKG | YYFDY | MNSLRAEDTAVYYCAQDETTTVTASYYFDYWGQGTLVTVSS |
| 003BB1 | SEQ ID NO: | SEQ ID NO: | SEQ ID NO: | SEQ ID NO: 869 |
| 72-E01- | 866 | 867 | 868 | EVQLVESGGGLVQPGRSLRLSCAASGFTFSNYGMHWVRQAP |
| 10 | NYGMH | VISNDGNTKTY | DETTTVTAS | GKGLEWVAVISNDGNTKTYADSVKGRFTISRDNSKNTLYLQM |
| | | ADSVKG | YYFDY | NSLRTEDTAVYYCAQDETTTVTASYYFDYWGQGTLVTVSS |
| 003BB1 | SEQ ID NO: | SEQ ID NO: | SEQ ID NO: | SEQ ID NO: 873 |
| 72-E01- | 870 | 871 | 872 | EVQLVESGGGVVQPGRSLRLSCAASGFTFSNYGMHWVRQA |
| 11 | NYGMH | VISNDGNTKTY | DETTTVTAS | PGKGLEWVAVISNDGNTKTYADSVKGRFTISRDNSKNTLYLQ |
| | | ADSVKG | YYFDY | MNSLRTEDTAVYYCAQDETTTVTASYYFDYWGQGTLVTVSS |
| 003BB1 | SEQ ID NO: | SEQ ID NO: | SEQ ID NO: | SEQ ID NO: 877 |
| 72-E01- | 874 | 875 | 876 | EVQLVESGGGLVQPGRSLRLSCAASGFTFSNYGMHWVRQAP |
| 12 | NYGMH | VISNDGNTKTY | DETTTVTAS | GKGLEWVAVISNDGNTKTYADSVKGRFTISRDNSKNTLYLQM |
| | | ADSVKG | YYFDY | NSLRAEDTAVYYCAQDETTTVTASYYFDYWGQGTLVTVSS |
| 003BB1 | SEQ ID NO: | SEQ ID NO: | SEQ ID NO: | SEQ ID NO: 881 |
| 72-E01- | 878 | 879 | 880 | EVQLVESGGGVVQPGGSLRLSCAASGFTFSNYGMHWVRQA |
| 13 | NYGMH | VISNDGNTKTY | DETTTVTAS | PGKGLEWVAVISNDGNTKTYADSVKGRFTISRDNSKNTLYLQ |
| | | ADSVKG | YYFDY | MNSLRAEDTAVYYCAQDETTTVTASYYFDYWGQGTLVTVSS |
| 003BB1 | SEQ ID NO: | SEQ ID NO: | SEQ ID NO: | SEQ ID NO: 885 |
| 72-E01- | 882 | 883 | 884 | EVQLVESGGGVVQPGRSLRLSCAASGFTFSNYGMHWVRQA |
| 14 | NYGMH | VISNDGNTKTY | DETTTVTAS | PGKGLEWVAVISNDGNTKTYADSVKGRFTISRDNSKNTLYLQ |
| | | ADSVKG | YYFDY | MNSLRAEDTAVYYCAQDETTTVTASYYFDYWGQGTLVTVSS |

[0213] Thus, we also provide multispecific molecules comprising a single variable heavy chain domain antibody described above and comprising another moiety. The other moiety can be selected from an antibody, an antibody fragment, an antibody mimetic or other polypeptide. The antibody fragment can be selected from a Fab, F(ab′)2, Fv, a single chain Fv fragment (scFv), a single domain antibody or fragment thereof. For example, it is a single V_{H} domain antibody. Non-limiting examples of other moieties include PD-1 as shown herein and PSMA. Exemplary V_{H} single domain antibodies that bind to PSMA and can be combined in a single molecule with the CD137 binding are shown herein. We also provide a V_{H} single domain antibody that binds to CD137 as described above and shown in table 7 for use in a multispecific molecule, for example with a single domain antibody as shown in table 8, 9, 10 or 11.

[0214] Nucleic acids encoding the single variable heavy chain domain antibody, vectors and host cells are also envisaged. Examples of host cells are described herein. Pharmaceutical compositions and kits comprising such a single variable heavy chain domain antibody are also provided. These can have the features provided below. Also provided are methods for treating a disease, e.g. a cancer using V_{H} single domain antibody that binds to CD137 as described above and shown in table 8, for example when used in a multispecific molecule. Also provided is V_{H} single domain antibody that binds to CD137 as described above and shown in table 8 for use in the treatment of disease, e.g. a cancer. Exemplary cancers are discussed herein, e.g. when the V_{H} single domain antibody that binds to CD137 is used in a multispecific molecule that binds PD-1. When used with PSMA as shown herein, the use is for treating prostate cancer.

Exemplary Immunoglobulins Included in the Binding Molecule and which Bind PD-1

[0215] Examples of moieties for example, single variable heavy chain domain antibodies, that bind to PD-1 and that may form one of the subunits of the binding molecules disclosed herein, such as a molecule that comprises or consists of two single domain antibodies that bind to both CD137 and PD-1, are described below and can be used in the various embodiments of the invention.

[0216] Molecules of the invention bind specifically to wild type human PD-1 (UniProt Accession No. Q15116, GenBank Accession No. U64863). Residues 1-20 correspond to the pre-sequence, residues 171 and beyond make up the transmembrane helix and the intracellular domain of PD-1. The sequence is shown in SEQ ID NO: 1877.

[0217] Unless otherwise specified, the term PD-1 as used herein refers to human PD-1. The terms “Programmed Death 1,” “Programmed Cell Death 1”, “Protein PD-1,” “PD-1,” “PD1,” “PDCD1,” “hPD-1” and “hPD-1” are used interchangeably, and include variants, isoforms, species homologs of human PD-1.

[0218] In one embodiment, the PD-1 binding subunit binds to wild type human PD-1 and/or cyno PD-1. The terms “PD-1 binding molecule”, “PD-1 binding protein” “anti-PD-1 single domain antibody”, “PD-1 binding subunit”, or “anti-PD-1 antibody” as used herein all refer to a molecule capable of binding to the human PD-1 antigen. The term “PD-1 binding molecule” includes a PD-1 binding protein. The binding reaction may be shown by standard methods (qualitative assays) including, for example, a binding assay, competition assay or a bioassay for determining the inhibition of PD-1 binding to its receptor or any kind of binding assays, with reference to a negative control test in which an antibody of unrelated specificity. Suitable assays are shown in the examples.

[0219] A binding molecule of the invention, including a single domain antibody and multivalent or multispecific binding agent described herein, “which binds” or is “capable of binding” an antigen of interest, e.g. “PD-1 binding molecule”, is one that binds, i.e. targets, the PD-1 antigen with sufficient affinity such that it is useful in therapy in targeting a cell or tissue expressing the antigen.

[0220] A single V_{H} domain antibody that binds to PD-1 may be as described in WO2018/127709 or WO2018/127710 both incorporated herein in their entirety by reference.

### PD-1 Non-Blocking Molecules

[0221] According to one aspect of the invention, the subunit that binds to PD-1, such as a single domain antibody, for example generated in vivo in transgenic mice, binds to human PD-1, but does not block the functional interaction between human PD-1 and its ligands, i.e. the interaction of human PD-1 with human PD-L1 and/or PD-L2. Thus, the anti-PD-1 V_{H} single domain antibodies bind an epitope that is distant from the part of the PD-1 protein that interacts with its ligands PD-L1 and PD-L2 and that is therefore outside the region of binding of known therapeutics targeting PD-1. This renders a human variable single domain antibody as described herein particularly useful in anchoring the multispecific binding molecules to human PD-1. Surprisingly, the inventors have also found that this binding to PD-1 also enables PD-1 to be down-modulated from the surface when used in a bispecific molecule with a CD137 binding V_{H}. Thus, the inventors have found that bispecific molecules described herein that comprise a V_{H} single domain antibody that binds to CD137 and a V_{H} single domain antibody that binds to PD-1, but which when used on its own does not block PD-1 signalling/activity when used in on its own, are capable of modulating the activity of PD-1; e.g. down-regulating the presence of PD-1 on the cell surface.

[0222] The V_{H} single domain antibody can exhibit one or more of the following properties when use don its own:

(a) binds to human PD-1 with a KD as shown in the examples;
(b) does not block the functional interaction of PD-1 with its ligands;
(c) binds to human PD-1 and cynomolgus monkey PD-1;
(d) does not bind to mouse PD-1;
(e) is capable of enhancing antagonistic action of an antagonistic human V_{H} single domain antibody when linked to such antibody;
(f) does not enhance T cell activation;
(g) binds to a human PD-1 with a binding affinity of KD 10⁻⁸ to 10⁻¹⁰;
(h) has an EC50 value in the subnanomolar range as determined in binding to CHO-PD-1 cell line
(i) binds to an epitope comprising one or more residue selected from one or more of R¹⁰⁴, D¹⁰⁵, F¹⁰⁶, H¹⁰⁷, M¹⁰⁸, S¹⁰⁹ and V¹¹⁰ of human PD-1 optionally where the epitope further comprises one or more or all of residues S⁶⁰, E⁶¹, S⁶², F⁶³, V⁶⁴, L⁶⁵, N⁶⁶, W⁶⁷, Y⁶⁸, R⁶⁹, M⁷⁰, S⁷¹, G⁹⁰, Q⁹¹, D⁹², C⁹³, R⁹⁴, F⁹⁵, R⁹⁶, V⁹⁷, T⁹⁸, V¹¹¹, R¹¹², A¹¹³ and R¹¹⁴, N¹⁰², D¹⁰⁵, F¹⁰⁶, H¹⁰⁷, M¹⁰⁸, R¹¹⁵, N³³, P³⁴, P³⁵, T³⁶, F³⁷, S³⁸, C⁵⁶, F⁵⁶, S⁵⁷, N⁵⁵, T⁵⁹, P¹⁰¹ and G¹⁰³ and/or
(j) is produced in a transgenic rodent as described herein and/or
(k) is capable to down-regulating the PD-1 on the cell surface when combined with a moiety targeting another cell surface receptor such as CD-137.

### Exemplary Sequences

[0223] In one embodiment, the single variable heavy chain domain antibody comprises human framework regions. In one embodiment, the single variable heavy chain domain antibody is selected from single variable heavy chain domain antibody as shown in table 8, 9 or 10 or from a sequence with at least 75%, 80%, 90% or 95% homology thereto. The PD-1 binding entity can also be selected from a part thereof, such as a CDR3.

[0224] In one embodiment, the single variable heavy chain domain antibody that binds to PD-1 and is used in the multispecific molecules that bind both, CD137 and PD-1, as described herein, comprises a CDR1 sequence selected from one of the CDR1 sequences shown in table 8 or a sequence with at least 75% homology thereto, a CDR2 sequence selected from one of the CDR2 sequences shown in table 8 or a sequence with at least 75%, 80%, 90% or 95% homology thereto and a CDR3 sequence selected from one of the CDR3 sequences shown in table 8 or a sequence with at least 75%, 80%, 90% or 95% homology thereto. In one embodiment, the single variable heavy chain domain antibody comprises a set of CDR1, 2, and 3 sequences as shown for V_{H} single domain antibodies PDA, PDA2 or PDA138G7(G109D) as shown in table 8 or a sequence with at least 75%, 80%, 90% or 95% sequence homology thereto. Thus, in one embodiment, the V_{H} single domain antibody has a CDR1 with SEQ ID NO. 1038 or a sequence with at least 75%, 80%, 90% or 95% sequence homology thereto, a CDR2 with SEQ ID NO. 1039 or a sequence with at least 75%, 80%, 90% or 95% sequence homology thereto and a CDR3 with SEQ ID NO. 1040 or a sequence with at least 75%, 80%, 90% or 95% sequence homology thereto. In another embodiment, the VH single domain antibody has a CDR1 with SEQ ID NO. 1130 or a sequence with at least 75%, 80%, 90% or 95% sequence homology thereto, a CDR2 with SEQ ID NO. 1131 or a sequence with at least 75%, 80%, 90% or 95% sequence homology thereto and a CDR3 with SEQ ID NO. 1132 or a sequence with at least 75%, 80%, 90% or 95% sequence homology thereto. In another embodiment, the V_{H} single domain antibody has a CDR1 with SEQ ID NO. 1294 or a sequence with at least 75%, 80%, 90% or 95% sequence homology thereto, a CDR2 with SEQ ID NO. 1295 and a CDR3 with SEQ ID NO. 1296 or a sequence with at least 75%, 80%, 90% or 95% sequence homology thereto.

[0225] In one embodiment, the single variable heavy chain domain antibody that binds to PD-1 and is used in the multispecific molecules that bind both, CD137 and PD-1, as described herein comprises a CDR1 sequence selected from one of the CDR1 sequences shown in table 9 or a sequence with at least 75%, 80%, 90% or 95% homology thereto, a CDR2 sequence selected from one of the CDR2 sequences shown in table 9 or a sequence with at least 75% homology thereto and a CDR3 sequence selected from one of the CDR3 sequences shown in table 9 or a sequence with at least 75%, 80%, 90% or 95% homology thereto. In one embodiment, the single variable heavy chain domain antibody comprises a set of CDR1, 2, and 3 sequences as shown for V_{H} single domain antibodies as shown in table 9 or a sequence with at least 75%, 80%, 90% or 95% sequence homology thereto. Thus, in one embodiment, the V_{H} single domain antibody has a CDR1 with SEQ ID NO. 886 or a sequence with at least 75%, 80%, 90% or 95% sequence homology thereto, a CDR2 with SEQ ID NO. 887 or a sequence with at least 75%, 80%, 90% or 95% sequence homology thereto and a CDR3 with SEQ ID NO: 889 or a sequence with at least 75%, 80%, 90% or 95% sequence homology thereto a CDR1 with SEQ ID NO., 891 or a sequence with at least 75%, 80%, 90% or 95% sequence homology thereto a CDR2 with SEQ ID NO. 892 and a CDR3 with SEQ ID NO: 893 or a sequence with at least 75%, 80%, 90% or 95% sequence homology thereto a CDR1 with SEQ ID NO. 895 or a sequence with at least 75%, 80%, 90% or 95% sequence homology thereto, a CDR2 with SEQ ID NO. 896 or a sequence with at least 75%, 80%, 90% or 95% sequence homology thereto and a CDR3 with SEQ ID NO. 897 or a sequence with at least 75%, 80%, 90% or 95% sequence homology thereto and so forth.

[0226] In one embodiment, the single variable heavy chain domain antibody that binds to PD-1 and is used in the multispecific molecules that bind both, CD137 and PD-1, as described herein comprises a CDR1 sequence selected from one of the CDR1 sequences shown in table 10 or a sequence with at least 75%, 80%, 90% or 95% homology thereto, a CDR2 sequence selected from one of the CDR2 sequences shown in table 10 or a sequence with at least 75%, 80%, 90% or 95% homology thereto and a CDR3 sequence selected from one of the CDR3 sequences shown in table 10 or a sequence with at least 75%, 80%, 90% or 95% homology thereto. In one embodiment, the single variable heavy chain domain antibody comprises a set of CDR1, 2, and 3 sequences as shown for V_{H} single domain antibodies as shown in table 9 or a sequence with at least 75%, 80%, 90% or 95% sequence homology thereto. Thus, in one embodiment, the V_{H} single domain antibody has a CDR1 with SEQ ID NO. 1086 or a sequence with at least 75%, 80%, 90% or 95% sequence homology thereto, a CDR2 with SEQ ID NO. 1087 or a sequence with at least 75%, 80%, 90% or 95% sequence homology thereto and a CDR3 with SEQ ID NO: 1088 or a sequence with at least 75%, 80%, 90% or 95% sequence homology thereto a CDR1 with SEQ ID NO. 1090 or a sequence with at least 75%, 80%, 90% or 95% sequence homology thereto a CDR2 with SEQ ID NO. 1091 and a CDR3 with SEQ ID NO: 1092 or a sequence with at least 75%, 80%, 90% or 95% sequence homology thereto a CDR1 with SEQ ID NO. 1094 or a sequence with at least 75%, 80%, 90% or 95% sequence homology thereto, a CDR2 with SEQ ID NO. 1095 or a sequence with at least 75%, 80%, 90% or 95% sequence homology thereto and a CDR3 with SEQ ID NO. 1096 or a sequence with at least 75%, 80%, 90% or 95% sequence homology thereto and so forth.

[0227] In one embodiment, the single variable heavy chain domain antibody that binds to PD-1 and is used in the multispecific molecules that bind both, CD137 and PD-1, as described herein comprises a full length sequence selected from one of the full length sequences shown in table 8, 9 or 10. Sequence homology can be at least 75%, that is at least 76%, 77%, 78%, 79%, 80%, 81%, 82%, 83%, 84%, 85%, 86%, 87%, 88%, 89%, 90%, 91%, 92%, 93%, 94%, 95%, 96%, 97%, 98% or 99% for example at least 90%, 91%, 92%, 93%, 94%, 95%, 96%, 97%, 98% or at least 99% or 100% sequence homology or identity.

TABLE 8
Exemplary PD-1 binding single V_{H} domain
antibodies that do not block the PD-1
function and its in on their own. These
single V_{H} domain antibodies can be used
in the multispecific binding molecules
described herein, e.g. by fusion to a
CD137 binding single V_{H} domain antibody
as described herein, e.g. in Table 2.

| | | | | SEQ ID |
|---|---|---|---|---|
| | | | | V_{H} |
| | | | | Full |
| Name | CDR1 | CDR2 | CDR3 | length |
| PDA | SEQ ID | SEQ ID | SEQ ID | SEQ ID |
| | NO: | NO: | NO: | NO: |
| | 1038 | 1039 | 1040 | 1041 |
| | DYALH | GISWN | EKGPGL | EVQLVE |
| | | GGSYG | TGSTAD | SGGGLV |
| | | YADSV | YYGLDA | QPGRSL |
| | | KG | | RLSCAA |
| | | | | SGFTFD |
| | | | | DYALHW |
| | | | | VRQAPG |
| | | | | KDLEWV |
| | | | | SGISWN |
| | | | | GGSYGY |
| | | | | ADSVKG |
| | | | | RFTISR |
| | | | | DNAKNS |
| | | | | LYLQMN |
| | | | | SLRAED |
| | | | | TALYYC |
| | | | | VREKGP |
| | | | | GLTGST |
| | | | | ADYYGL |
| | | | | DAWGQG |
| | | | | TMVTVS |
| | | | | S |
| PDA2 | SEQ ID | SEQ ID | SEQ ID | SEQ ID |
| | NO: | NO: | NO: | NO: |
| | 1130 | 1131 | 1132 | 1133 |
| | DYAMS | GITW | DKYSYA | EVQLVE |
| | | NAGS | WSYDDF | SGGGVV |
| | | TGYA | Dl | RPGGSL |
| | | DSVKG | | RLSCAA |
| | | | | SGFTFD |
| | | | | DYAMSW |
| | | | | VRQAPG |
| | | | | KGLEWV |
| | | | | SGITWN |
| | | | | AGSTGY |
| | | | | ADSVKG |
| | | | | RFTISR |
| | | | | DNAKNS |
| | | | | LYLQMN |
| | | | | SLRAED |
| | | | | TALYYC |
| | | | | VRDKYS |
| | | | | YAWSYD |
| | | | | DFDIWG |
| | | | | QGTMVT |
| | | | | VSS |
| PD138G7 | SEQ ID | SEQ ID | SEQ ID | SEQ ID |
| (G109D) | NO: | NO: | NO: | NO: |
| | 1294 | 1295 | 1296 | 1297 |
| | DYAMS | GITWN | DKYSYA | EVQLVE |
| | | GGSTG | WSYDDF | SGGGVV |
| | | YADSV | Dl | RPGGSL |
| | | KD | | RLSCAA |
| | | | | SGFTFD |
| | | | | DYAMSW |
| | | | | VRQAPG |
| | | | | KGLEWV |
| | | | | SGITWN |
| | | | | GGSTGY |
| | | | | ADSVKD |
| | | | | RFTISR |
| | | | | DNAKNS |
| | | | | LYLQMN |
| | | | | SLRAED |
| | | | | TALYYC |
| | | | | VRDKYS |
| | | | | YAWSYD |
| | | | | DFDIWG |
| | | | | QGTMVT |
| | | | | VSS |

TABLE 9
Further exemplary PD-1 binding single V_{H} domain antibodies
that do not block the function of human PD-1 when use don
their own. These V_{H} domain antibodies bind to an epitope
comprising one or more or all residues selected from N¹⁰²,
D¹⁰⁵, F¹⁰⁶, H¹⁰⁷, M¹⁰⁸, R¹¹⁴ and R¹¹⁵ of human PD-1. These
single V_{H} domain antibodies can be used in the
multispecific binding molecules described herein,
e.g. by fusion to a CD137 binding single V_{H} domain
antibody as described herein, e.g. in Table 2.

| | CDR1 | CDR2 | CDR3 | Full length V_{H} sequence with |
|---|---|---|---|---|
| | Sequence | Sequence | Sequence | formula 1: FR1-CDR1-FR2- |
| Name | of V_{H} | Of V_{H} | Of V_{H} | CDR2-FR3-CDR3-FR4 |
| PD1.1 | SEQ ID NO: | SEQ ID NO: | SEQ ID NO: | SEQ ID NO: 889 |
| | 886 DHAMH | 887 | 888 | EVQLLESGGGSVQPGRSLRLSCAASGFTFDDHAMHWVRQ |
| | | GISWNSGSM | EKGPGLTGSTA | APGKGLEWVSGISWNSGSMGYADSVKDRFTISRDNAKSSL |
| | | GYADSVKD | DYYGLDV | YLQMNSLRAEDTALYYCVREKGPGLTGSTADYYGLDVWGQ |
| | | | | GTMVTVSS |
| PD 1.2 | SEQ ID NO: | SEQ ID NO: | SEQ ID NO: | SEQ ID NO: 893 |
| | 890 DYAMH | 891 | 892 | EVQLVESGGGLVQPGRSLRLSCAASGFTFDDYAMHWVRQ |
| | | GISWNGGS | DKGPGLIGSTA | APGKDLEWVSGISWNGGSMGYAASVKGRFTISRDNAKNSL |
| | | MGYAASVK | DYYGLDV | YLQMNSLRAEDTALYYCVKDKGPGLIGSTADYYGLDVWGQ |
| | | G | | GTTVTVSS |
| PD 1.3 | SEQ ID NO: | SEQ ID NO: | SEQ ID NO: | SEQ ID NO: 897 |
| | 894 DYAMH | 895 | 896 | EVQLLESGGGLVQPGRSLRLSCAASGFTFDDYAMHWVRQA |
| | | GISWNSGSM | DKGPGLIGSTA | PGKGREWVSGISWNSGSMGYADSVKDRFTISRDNAKNSLY |
| | | GYADSVKD | DYHGLDV | LQMNSLRAEDTALYYCVKDKGPGLIGSTADYHGLDVWGQG |
| | | | | TTVTVSS |
| PD 1.4 | SEQ ID NO: | SEQ ID NO: | SEQ ID NO: | SEQ ID NO: 901 |
| | 898 DYAMH | 899 | 900 | EVQLLESGGGLVQPGRSLRLSCAASGFTFADYAMHWVRQA |
| | | GISWNGGS | DKGPGLTGTTA | PGKGREWVSGISWNGGSMGYAESVKGRFTISRDNAKNSLY |
| | | MGYAESVKG | DYYGMDV | LQMNSLRAEDSALYYCVKDKGPGLTGTTADYYGMDVWGQ |
| | | | | GTTVTVSS |
| PD 1.5 | SEQ ID NO: | SEQ ID NO: | SEQ ID NO: | SEQ ID NO: 905 |
| | 902 DYAMH | 903 | 904 | EVQLVESGGGLVQPGRSLRLSCAASGFTFDDYAMHWVRQ |
| | | GISWNGGS | DKGPGLIGSTA | APGKGLEWVSGISWNGGSMGYADSVKDRFTISRDNAKNSL |
| | | MGYADSVK | DYHGLDV | YLQMNRLRAEDTALYYCVKDKGPGLIGSTADYHGLDVWGQ |
| | | D | | GTTVTVSS |
| PD 1.6 | SEQ ID NO: | SEQ ID NO: | SEQ ID NO: | SEQ ID NO: 909 |
| | 906 SYAMH | 907 | 908 | EVQLVESGGGVVQPGRSLRLSCAASGFTFSSYAMHWVRQA |
| | | GISWNSGSM | DKGPGLTGTTA | PGKGREWVSGISWNSGSMGYAESVKGRFTISRDNAKNSLY |
| | | GYAESVKG | DYYGMDV | LQMNSLRAEDSALYYCVKDKGPGLTGTTADYYGMDVWGQ |
| | | | | GTTVTVSS |
| PD 1.7 | SEQ ID NO: | SEQ ID NO: | SEQ ID NO: | SEQ ID NO: 913 |
| | 910 DYAMH | 911 | 912 | EVQLVESGGGVIQPGRSLRLSCAASGFTFDDYAMHWVRQA |
| | | GISWNGGS | DKGPGLTGTTA | PGKGREWVSGISWNGGSMGYAESVKGRFTISRDNAQNSL |
| | | MGYAESVKG | DYYGMDV | YLQMNSLRAEDSALYYCVKDKGPGLTGTTADYYGMDVWG |
| | | | | QGTTVTVSS |
| PD 1.8 | SEQ ID NO: | SEQ ID NO: | SEQ ID NO: | SEQ ID NO: 917 |
| | 914 DYAMH | 915 | 916 | EVQLVESGGGLVQPGRSLRLSCAASGFTFDDYAMHWVRQ |
| | | GISWNSGSM | DKGPGLIGSTA | APGKGLEWVSGISWNSGSMGYADSVKDRFTISRDNAKNSL |
| | | GYADSVKD | DYHGLDV | YLQMNSLRAEDTALYYCVKDKGPGLIGSTADYHGLDVWGQ |
| | | | | GTTVTVSS |
| PD 1.9 | SEQ ID NO: | SEQ ID NO: | SEQ ID NO: | SEQ ID NO: 921 |
| | 918 DYAMH | 919 | 920 | EVQLVESGGGCVQPGRSLRISCAASGFTFDDYAMHWVRQ |
| | | GISWNGGS | DKGPGLIGSTA | APGKGREWVSGISWNGGSMGYAESVKGRFTISRDNAKNSL |
| | | MGYAESVKG | DYYGMDV | YLQMNSLRAEDSALYYCVKDKGPGLIGSTADYYGMDVWG |
| | | | | QGTTVTVSS |
| PD 1.10 | SEQ ID NO: | SEQ ID NO: | SEQ ID NO: | SEQ ID NO: 925 |
| | 922 DYAMH | 923 | 924 | EVQLVESGGGLVQPGRSLRLSCAASGFTFADYAMHWVRQ |
| | | GISWNGGS | DKGPGLTGTTA | APGKGREWVSGISWNGGSMGYAESVKGRFTISRDNAKNSL |
| | | MGYAESVKG | DYYGMDV | YLQMNSLRAEDSALYYCVKDKGPGLTGTTADYYGMDVWG |
| | | | | QGTTVTVSS |
| PD 1.11 | SEQ ID NO: | SEQ ID NO: | SEQ ID NO: | SEQ ID NO: 929 |
| | 926 DYAMH | 927 | 928 | EVQLLESGGGFVQPGRSLRISCAASGFTFDDYAMHWVRQA |
| | | GISWNGGS | DKGPGLIGSTA | PGKDLEWVSGISWNGGSMGYAESVKGRFTISRDNAKNSLY |
| | | MGYAESVKG | DYYGLDV | LKMNSLRVEDTALYYCVKDKGPGLIGSTADYYGLDVWGQG |
| | | | | TTVTVSS |
| PD 1.12 | SEQ ID NO: | SEQ ID NO: | SEQ ID NO: | SEQ ID NO: 933 |
| | 930 DYAMH | 931 | 932 | QVQLVESGGGLVQPGRSLRLSCAASGFTFDDYAMHWVRQ |
| | | GISWNGGS | DKGPGLTGSTA | APGKGREWVSGISWNGGSMGYADSVKDRFTISRDNAKNS |
| | | MGYADSVK | DYHGMDV | LYLQMNSLRAEDTALYYCVKDKGPGLTGSTADYHGMDVW |
| | | D | | G QGTTVTVSS |
| PD 1.13 | SEQ ID NO: | SEQ ID NO: | SEQ ID NO: | SEQ ID NO: 937 |
| | 934 DYAMH | 935 | 936 | QVQLVESGGGLVQPGRSLRLSCAASGFTFDDYAMHWVRQ |
| | | GISWNGGS | DKGPGLIGSTA | APGKDLEWVSGISWNGGSMGYAASVKGRFTISRDNAQNS |
| | | MGYAASVK | DYYGLDV | LYLQMNSLRAEDTALYYCVKDKGPGLIGSTADYYGLDVWG |
| | | G | | QGTTVTVSS |
| PD 1.14 | SEQ ID NO: | SEQ ID NO: | SEQ ID NO: | SEQ ID NO: 941 |
| | 938 GYAMH | 939 | 940 | EVQLVESGGGLVQPGRSLRLSCAASGFTFDGYAMHWVRQ |
| | | GISWNSGSM | DKGPGLTGSTA | APGKGREWVSGISWNSGSMGYAESVKGRFTISRDNAKNSL |
| | | GYAESVKG | DYYGMDV | YLQMNSLRAEDSALYYCVKDKGPGLTGSTADYYGMDVWG |
| | | | | QGTTVTVSS |
| PD 1.15 | SEQ ID NO: | SEQ ID NO: | SEQ ID NO: | SEQ ID NO: 945 |
| | 942 DYAMH | 943 | 944 | EVQLLESGGGLVQPGRSLRLSCTASGFTFDDYAMHWVRQA |
| | | GISWNSGSM | DKGPGLIGSTA | PGKGREWVSGISWNSGSMGYAESVKGRFTISRDNAKNSLY |
| | | GYAESVKG | DYYGMDV | LQMNSLRAEDSALYYCVKDKGPGLIGSTADYYGMDVWGQ |
| | | | | GTTVTVSS |
| PD 1.16 | SEQ ID NO: | SEQ ID NO: | SEQ ID NO: | SEQ ID NO: 949 |
| | 946 DYAMH | 947 | 948 | QVQLVESGGGLVQPGRSLRLSCAASGFTFDDYAMHWVRQ |
| | | GISWNGGS | DKGPGLIGSTA | APGKGREWVSGISWNGGSMGYAESVKGRFTISRDNAKNSL |
| | | MGYAESVKG | DYYGMDV | YLQMNSLRAEDSALYYCVKDKGPGLIGSTADYYGMDVWG |
| | | | | QGTTVTVSS |
| PD 1.17 | SEQ ID NO: | SEQ ID NO: | SEQ ID NO: | SEQ ID NO: 953 |
| | 950 DYAMH | 951 | 952 | EVQLLESGGGLVQPGGSLRLSCAASGFTFDDYAMHWVRQ |
| | | GISWNSGSM | DKGPGLIGSTA | APGKGLEWVSGISWNSGSMGYAASVKDRFTISRDNAKNSL |
| | | GYAASVKD | DYHGLDV | YLQMNSLTTEDTALYYCVKDKGPGLIGSTADYHGLDVWGQ |
| | | | | GTTVTVSS |
| PD 1.18 | SEQ ID NO: | SEQ ID NO: | SEQ ID NO: | SEQ ID NO: 957 |
| | 954 DYAMH | 955 | 956 | QVQLVESGGGLVQPGRSLRLSCAASGFTFDDYAMHWVRQ |
| | | GISWNGGS | DKGPGLIGSTA | APGKDLEWVSGISWNGGSMGYAASVKGRFTISRDNAKNSL |
| | | MGYAASVK | DYYGLDV | YLQMNSLRAEDTALYYCVKDKGPGLIGSTADYYGLDVWGQ |
| | | G | | GTTVTVSS |
| PD 1.19 | SEQ ID NO: | SEQ ID NO: | SEQ ID NO: | SEQ ID NO: 961 |
| | 958 DYAMH | 959 | 960 | EVQLVESGGGLVQPGRSLRLSCAASGFTFDDYAMHWVRQ |
| | | GISWNGGS | EKGPGLTGSTA | APGKDLEWVSGISWNGGSMGYADSVKGRFTISRDNAKNSL |
| | | MGYADSVK | DYYGLDV | YLQMNSLRAEDTALYYCVREKGPGLTGSTADYYGLDVWGQ |
| | | G | | GTMVTVSS |
| PD 1.20 | SEQ ID NO: | SEQ ID NO: | SEQ ID NO: | SEQ ID NO: 965 |
| | 962 DYAMH | 963 | 964 | EVQLVESGGGLVQPGRSLRLSCAASGFTFDDYAMHWVRQ |
| | | GISWNGGS | EKGPGLTGSTA | APGKDLEWVSGISWNGGSMGYADSVKGRFTISRDNAKNSL |
| | | MGYADSVK | DYYGLDV | YLQMNSLRAEDTALYYCVREKGPGLTGSTADYYGLDVWGQ |
| | | G | | GTMVTVSS |
| PD 1.21 | SEQ ID NO: | SEQ ID NO: | SEQ ID NO: | SEQ ID NO: 969 |
| | 966 | 967 | 968 | EVQLVESGGGLVQPGRSLRLSCAASGFTFDDYAMHWVRQ |
| | DYAMH | GISWNGGS | EKGPGLTGSTA | APGKDLEWVSGISWNGGSMGYAASVKGRFTISRDNAKNSL |
| | | MGYAASVK | DYYGLDV | YLQMNSLRAEDTALYYCVREKGPGLTGSTADYYGLDVWGQ |
| | | G | | GTMVTVSS |
| PD 1.22 | SEQ ID NO: | SEQ ID NO: | SEQ ID NO: | SEQ ID NO: 973 |
| | 970 | 971 | 972 | EVQLVESGGGLVQPGRSLRLSCAASGFTFDDYAMHWVRQ |
| | DYAMH | GISWNGGS | EKGPGLTGSTA | APGKDLEWVSGISWNGGSMGYAASVKGRFTISRDNAKNSL |
| | | MGYAASVK | DYYGLDA | YLQMNSLRAEDTALYYCVREKGPGLTGSTADYYGLDAWGQ |
| | | G | | GTMVTVSS |
| PD 1.23 | SEQ ID NO: | SEQ ID NO: | SEQ ID NO: | SEQ ID NO: 977 |
| | 974 | 975 | 976 | EVQLVESGGGLVQPGRSLRLSCAASGFTFDDYAMHWVRQ |
| | DYAMH | GISWNSGSM | EKGPGLTGSTA | APGKDLEWVSGISWNSGSMGYAASVKGRFTISRDNAKNSL |
| | | GYAASVKG | DYYGLDV | YLQMNSLRAEDTALYYCVREKGPGLTGSTADYYGLDVWGQ |
| | | | | GTMVTVSS |
| PD 1.24 | SEQ ID NO: | SEQ ID NO: | SEQ ID NO: | SEQ ID NO: 981 |
| | 978 | 979 | 980 | EVQLVESGGGLVQPGRSLRLSCAASGFTFDDYAMHWVRQ |
| | DYAMH | GISWNSGSM | EKGPGLTGSTA | APGKDLEWVSGISWNSGSMGYAASVKGRFTISRDNAKNSL |
| | | GYAASVKG | DYYGLDA | YLQMNSLRAEDTALYYCVREKGPGLTGSTADYYGLDAWGQ |
| | | | | GTMVTVSS |
| PD 1.25 | SEQ ID NO: | SEQ ID NO: | SEQ ID NO: | SEQ ID NO: 985 |
| | 982 | 983 | 984 | EVQLVESGGGLVQPGRSLRLSCAASGFTFDDYAMHWVRQ |
| | DYAMH | GISWNGGSQ | EKGPGLTGSTA | APGKDLEWVSGISWNGGSQGYAASVKGRFTISRDNAKNSL |
| | | GYAASVKG | DYYGLDA | YLQMNSLRAEDTALYYCVREKGPGLTGSTADYYGLDAWGQ |
| | | | | GTMVTVSS |
| PD 1.26 | SEQ ID NO: | SEQ ID NO: | SEQ ID NO: | SEQ ID NO: 989 |
| | 986 | 987 | 988 | EVQLVESGGGLVQPGRSLRLSCAASGFTFDDYAMHWVRQ |
| | DYAMH | GISWNGGS | EKGPGLTGSTA | APGKDLEWVSGISWNGGSMGYADSVKGRFTISRDNAKNSL |
| | | MGYADSVK | DYYGLDA | YLQMNSLRAEDTALYYCVREKGPGLTGSTADYYGLDAWGQ |
| | | G | | GTMVTVSS |
| PD 1.27 | SEQ ID NO: | SEQ ID NO: | SEQ ID NO: | SEQ ID NO: 993 |
| | 990 | 991 | 992 | EVQLVESGGGLVQPGRSLRLSCAASGFTFDDYAMHWVRQ |
| | DYAMH | GISWNGGSR | EKGPGLTGSTA | APGKDLEWVSGISWNGGSRGYAASVKGRFTISRDNAKNSL |
| | | GYAASVKG | DYYGLDA | YLQMNSLRAEDTALYYCVREKGPGLTGSTADYYGLDAWGQ |
| | | | | GTMVTVSS |
| PD 1.28 | SEQ ID NO: | SEQ ID NO: | SEQ ID NO: | SEQ ID NO: |
| | 994 | 995 | 996 | 7EVQLVESGGGLVQPGRSLRLSCAASGFTFDDYAMHWVR |
| | DYAMH | GISWNAGS | EKGPGLTGSTA | QAPGKDLEWVSGISWNAGSMGYAASVKGRFTISRDNAKN |
| | | MGYAASVK | DYYGLDA | SLYLQMNSLRAEDTALYYCVREKGPGLTGSTADYYGLDAW |
| | | G | | GQGTMVTVSS |
| PD 1.29 | SEQ ID NO: | SEQ ID NO: | SEQ ID NO: | SEQ ID NO: 1001 |
| | 998 | 999 | 1000 | EVQLVESGGGLVQPGRSLRLSCAASGFTFDDYAMHWVRQ |
| | DYAMH | GISWNSGSM | EKGPGLTGSTA | APGKDLEWVSGISWNSGSMGYADSVKGRFTISRDNAKNSL |
| | | GYADSVKG | DYYGLDV | YLQMNSLRAEDTALYYCVREKGPGLTGSTADYYGLDVWGQ |
| | | | | GTMVTVSS |
| PD 1.30 | SEQ ID NO: | SEQ ID NO: | SEQ ID NO: | SEQ ID NO: 1005 |
| | 1002 | 1003 | 1004 | EVQLVESGGGLVQPGRSLRLSCAASGFTFDDYAGHWVRQA |
| | DYAGH | GISWNGGS | EKGPGLTGSTA | PGKDLEWVSGISWNGGSMGYAASVKGRFTISRDNAKNSLY |
| | | MGYAASVK | DYYGLDA | LQMNSLRAEDTALYYCVREKGPGLTGSTADYYGLDAWGQ |
| | | G | | GTMVTVSS |
| PD 1.31 | SEQ ID NO: | SEQ ID NO: | SEQ ID NO: | SEQ ID NO: 1009 |
| | 1006 | 1007 | 1008 | EVQLVESGGGLVQPGRSLRLSCAASGFTFDDYALHWVRQA |
| | DYALH | GISWNGGS | EKGPGLTGSTA | PGKDLEWVSGISWNGGSMGYAASVKGRFTISRDNAKNSLY |
| | | MGYAASVK | DYYGLDA | LQMNSLRAEDTALYYCVREKGPGLTGSTADYYGLDAWGQ |
| | | G | | GTMVTVSS |
| PD 1.32 | SEQ ID NO: | SEQ ID NO: | SEQ ID NO: | SEQ ID NO: 1013 |
| | 1010 | 1011 | 1012 | EVQLVESGGGLVQPGRSLRLSCAASGFTFDDYAMHWVRQ |
| | DYAMH | GISWNSGSM | EKGPGLTGSTA | APGKDLEWVSGISWNSGSMGYADSVKGRFTISRDNAKNSL |
| | | GYADSVKG | DYYGLDA | YLQMNSLRAEDTALYYCVREKGPGLTGSTADYYGLDAWGQ |
| | | | | GTMVTVSS |
| PD 1.33 | SEQ ID NO: | SEQ ID NO: | SEQ ID NO: | SEQ ID NO: 1017 |
| | 1014 | 1015 | 1016 | EVQLVESGGGLVQPGRSLRLSCAASGFTFDDYAMHWVRQ |
| | DYAMH | GISWNGGSY | EKGPGLTGSTA | APGKDLEWVSGISWNGGSYGYADSVKGRFTISRDNAKNSL |
| | | GYADSVKG | DYYGLDA | YLQMNSLRAEDTALYYCVREKGPGLTGSTADYYGLDAWGQ |
| | | | | GTMVTVSS |
| PD 1.34 | SEQ ID NO: | SEQ ID NO: | SEQ ID NO: | SEQ ID NO: 1021 |
| | 1018 | 1019 | 1020 | EVQLVESGGGLVQPGRSLRLSCAASGFTFDDYAMHWVRQ |
| | DYAMH | GISWNGGSQ | EKGPGLTGSTA | APGKDLEWVSGISWNGGSQGYADSVKGRFTISRDNAKNSL |
| | | GYADSVKG | DYYGLDA | YLQMNSLRAEDTALYYCVREKGPGLTGSTADYYGLDAWGQ |
| | | | | GTMVTVSS |
| PD 1.35 | SEQ ID NO: | SEQ ID NO: | SEQ ID NO: | SEQ ID NO: 1025 |
| | 1022 | 1023 | 1024 | EVQLVESGGGLVQPGRSLRLSCAASGFTFDDYAMHWVRQ |
| | DYAMH | GISWNGGSK | EKGPGLTGSTA | APGKDLEWVSGISWNGGSKGYADSVKGRFTISRDNAKNSL |
| | | GYADSVKG | DYYGLDA | YLQMNSLRAEDTALYYCVREKGPGLTGSTADYYGLDAWGQ |
| | | | | GTMVTVSS |
| PD 1.36 | SEQ ID NO: | SEQ ID NO: | SEQ ID NO: | SEQ ID NO: 1029 |
| | 1026 | 1027 | 1028 | EVQLVESGGGLVQPGRSLRLSCAASGFTFDDYAMHWVRQ |
| | DYAMH | GISWNAGS | EKGPGLTGSTA | APGKDLEWVSGISWNAGSMGYADSVKGRFTISRDNAKNSL |
| | | MGYADSVK | DYYGLDA | YLQMNSLRAEDTALYYCVREKGPGLTGSTADYYGLDAWGQ |
| | | G | | GTMVTVSS |
| PD 1.37 | SEQ ID NO: | SEQ ID NO: | SEQ ID NO: | SEQ ID NO: 1033 |
| | 1030 | 1031 | 1032 | EVQLVESGGGLVQPGRSLRLSCAASGFTFDDYAFHWVRQA |
| | DYAFH | GISWNGGS | EKGPGLTGSTA | PGKDLEWVSGISWNGGSMGYADSVKGRFTISRDNAKNSLY |
| | | MGYADSVK | DYYGLDA | LQMNSLRAEDTALYYCVREKGPGLTGSTADYYGLDAWGQ |
| | | G | | GTMVTVSS |
| PD 1.38 | SEQ ID NO: | SEQ ID NO: | SEQ ID NO: | SEQ ID NO: 1037 |
| | 1034 | 1035 | 1036 | EVQLVESGGGLVQPGRSLRLSCAASGFTFDDYALHWVRQA |
| | DYALH | GISWNGGS | EKGPGLTGSTA | PGKDLEWVSGISWNGGSMGYADSVKGRFTISRDNAKNSLY |
| | | MGYADSVK | DYYGLDA | LQMNSLRAEDTALYYCVREKGPGLTGSTADYYGLDAWGQ |
| | | G | | GTMVTVSS |
| PD 1.39 | SEQ ID NO: | SEQ ID NO: | SEQ ID NO: | SEQ ID NO: 1041 |
| | 1038 | 1039 | 1040 | EVQLVESGGGLVQPGRSLRLSCAASGFTFDDYALHWVRQA |
| | DYALH | GISWNGGSY | EKGPGLTGSTA | PGKDLEWVSGISWNGGSYGYADSVKGRFTISRDNAKNSLYL |
| | | GYADSVKG | DYYGLDA | QMNSLRAEDTALYYCVREKGPGLTGSTADYYGLDAWGQG |
| | | | | TMVTVSS |
| PD 1.40 | SEQ ID NO: | SEQ ID NO: | SEQ ID NO: | SEQ ID NO: 1045 |
| | 1042 | 1043 | 1044 | EVQLVESGGGLVQPGRSLRLSCAASGFTFDDYALHWVRQA |
| | DYALH | GISWNGGSQ | EKGPGLTGSTA | PGKDLEWVSGISWNGGSQGYADSVKGRFTISRDNAKNSLY |
| | | GYADSVKG | DYYGLDA | LQMNSLRAEDTALYYCVREKGPGLTGSTADYYGLDAWGQ |
| | | | | GTMVTVSS |
| PD 1.41 | SEQ ID NO: | SEQ ID NO: | SEQ ID NO: | SEQ ID NO: 1049 |
| | 1046 | 1047 | 1048 | EVQLVESGGGLVQPGRSLRLSCAASGFTFDDYAFHWVRQA |
| | DYAFH | GISWNGGSY | EKGPGLTGSTA | PGKDLEWVSGISWNGGSYGYADSVKGRFTISRDNAKNSLYL |
| | | GYADSVKG | DYYGLDA | QMNSLRAEDTALYYCVREKGPGLTGSTADYYGLDAWGQG |
| | | | | TMVTVSS |
| PD 1.42 | SEQ ID NO: | SEQ ID NO: | SEQ ID NO: | SEQ ID NO: 1053 |
| | 1050 | 1051 | 1052 | EVQLVESGGGLVQPGRSLRLSCAASGFTFDDYAFHWVRQA |
| | DYAFH | GISWNGGSQ | EKGPGLTGSTA | PGKDLEWVSGISWNGGSQGYADSVKGRFTISRDNAKNSLY |
| | | GYADSVKG | DYYGLDA | LQMNSLRAEDTALYYCVREKGPGLTGSTADYYGLDAWGQ |
| | | | | GTMVTVSS |
| PD 1.43 | SEQ ID NO: | SEQ ID NO: | SEQ ID NO: | SEQ ID NO: 1057 |
| | 1054 | 1055 | 1056 | EVQLVESGGGLVQPGRSLRLSCAASGFTFDDYAFHWVRQA |
| | DYAFH | GISWNAGSY | EKGPGLTGSTA | PGKDLEWVSGISWNAGSYGYADSVKGRFTISRDNAKNSLYL |
| | | GYADSVKG | DYYGLDA | QMNSLRAEDTALYYCVREKGPGLTGSTADYYGLDAWGQG |
| | | | | TMVTVSS |
| PD 1.44 | SEQ ID NO: | SEQ ID NO: | SEQ ID NO: | SEQ ID NO: 1061 |
| | 1058 | 1059 | 1060 | EVQLVESGGGLVQPGRSLRLSCAASGFTFDDYALHWVRQA |
| | DYALH | GISWNSGSY | EKGPGLTGSTA | PGKDLEWVSGISWNSGSYGYADSVKGRFTISRDNAKNSLYL |
| | | GYADSVKG | DYYGLDA | QMNSLRAEDTALYYCVREKGPGLTGSTADYYGLDAWGQG |
| | | | | TMVTVSS |
| PD 1.45 | SEQ ID NO: | SEQ ID NO: | SEQ ID NO: | SEQ ID NO: 1065 |
| | 1062 | 1063 | 1064 | EVQLVESGGGLVQPGRSLRLSCAASGFTFDDYALHWVRQA |
| | DYALH | GISWNAGSQ | EKGPGLTGSTA | PGKDLEWVSGISWNAGSQGYADSVKGRFTISRDNAKNSLY |
| | | GYADSVKG | DYYGLDA | LQMNSLRAEDTALYYCVREKGPGLTGSTADYYGLDAWGQ |
| | | | | GTMVTVSS |
| PD 1.46 | SEQ ID NO: | SEQ ID NO: | SEQ ID NO: | SEQ ID NO: 1069 |
| | 1066 | 1067 | 1068 | EVQLVESGGGLVQPGRSLRLSCAASGFTFDDYALHWVRQA |
| | DYALH | GISWNAGSY | EKGPGLTGSTA | PGKDLEWVSGISWNAGSYGYADSVKGRFTISRDNAKNSLYL |
| | | GYADSVKG | DYYGLDA | QMNSLRAEDTALYYCVREKGPGLTGSTADYYGLDAWGQG |
| | | | | TMVTVSS |
| PD 1.47 | SEQ ID NO: | SEQ ID NO: | SEQ ID NO: | SEQ ID NO: 1073 |
| | 1070 | 1071 | 1072 | EVQLVESGGGLVQPGRSLRLSCAASGFTFDDYAFHWVRQA |
| | DYAFH | GISWNSGSY | EKGPGLTGSTA | PGKDLEWVSGISWNSGSYGYADSVKGRFTISRDNAKNSLYL |
| | | GYADSVKG | DYYGLDA | QMNSLRAEDTALYYCVREKGPGLTGSTADYYGLDAWGQG |
| | | | | TMVTVSS |
| PD 1.48 | SEQ ID NO: | SEQ ID NO: | SEQ ID NO: | SEQ ID NO: 1077 |
| | 1074 | 1075 | 6EKGPGLTGST | EVQLVESGGGLVQPGRSLRLSCAASGFTFDDYALHWVRQA |
| | DYALH | GISWNSGSQ | ADYYGLDA | PGKDLEWVSGISWNSGSQGYADSVKGRFTISRDNAKNSLYL |
| | | GYADSVKG | | QMNSLRAEDTALYYCVREKGPGLTGSTADYYGLDAWGQG |
| | | | | TMVTVSS |
| PD 1.49 | SEQ ID NO: | SEQ ID NO: | SEQ ID NO: | SEQ ID NO: 1081 |
| | 1078 | 1079 | 1080 | EVQLVESGGGLVQPGRSLRLSCAASGFTFDDYAFHWVRQA |
| | DYAFH | GISWNSGSQ | EKGPGLTGSTA | PGKDLEWVSGISWNSGSQGYADSVKGRFTISRDNAKNSLYL |
| | | GYADSVKG | DYYGLDA | QMNSLRAEDTALYYCVREKGPGLTGSTADYYGLDAWGQG |
| | | | | TMVTVSS |
| PD 1.50 | SEQ ID NO: | SEQ ID NO: | SEQ ID NO: | SEQ ID NO: 1085 |
| | 1082 | 1083 | 1084 | EVQLVESGGGLVQPGRSLRLSCAASGFTFDDYAFHWVRQA |
| | DYAFH | GISWNAGSQ | EKGPGLTGSTA | PGKDLEWVSGISWNAGSQGYADSVKGRFTISRDNAKNSLY |
| | | GYADSVKG | DYYGLDA | LQMNSLRAEDTALYYCVREKGPGLTGSTADYYGLDAWGQ |
| | | | | GTMVTVSS |

TABLE 10
Further exemplary PD-1 binding single V_{H} domain antibodies
that do not block PD-1 function, e.g. the functional
interaction between human PD-1 and its ligands PD-L1
and/or PD-L2 when used in on their own. These bind to
an epitope comprising one or more or all residues
selected from R¹⁰⁴, D¹⁰⁵, F¹⁰⁶, H¹⁰⁷, M¹⁰⁸, S¹⁰⁹ and V¹¹⁰
of human PD-1. These single VH domain antibodies can
be used in the multispecific binding molecules described
herein, e.g. by fusion to a CD137 binding single
VH domain antibody as described herein, e.g. in Table 2.

| | CDR1 | CDR2 | CDR3 | |
|---|---|---|---|---|
| | sequence | sequence | sequence | |
| Name | of V_{H} | of V_{H} | of V_{H} | Full length V_{H} sequence |
| PD2. | SEQ ID NO: | SEQ ID NO: | SEQ ID NO: | SEQ ID NO: 1089 |
| 1 | 1086 | 1087 | 1088 | EVQLVESGGGVVRPGGSLRLSCAASGFTFDDYAMSWVRQAPGK |
| | DYAMS | GITWNGGST | DKYSYAWSY | GLEWVSGITWNGGSTGYADSVKDRFTISRDNAKNSLYLQMNSLR |
| | | GYADSVKD | DGFDI | AEDTALYYCVRDKYSYAWSYDGFDIWGQGTMVTVSS |
| PD2. | SEQ ID NO: | SEQ ID NO: | SEQ ID NO: | SEQ ID NO: 1093 |
| 2 | 1090 | 1091 | 1092 | EVQLLESGGGWRPGGSLRLSCAASGFTFDDYGMSWVRQPPGK |
| | DYGMS | GISRNGGSA | EKYSSGWSY | GLEWVSGISRNGGSAGYSDSAKDRFTISRDNAKNSLYLQMNSLRA |
| | | GYSDSAKD | DDFDI | DDTAMYYCAREKYSSGWSYDDFDIWGQGTMVTVSS |
| PD2. | SEQ ID | SEQ ID NO: | SEQ ID NO: | SEQ ID NO: 1097 |
| 3 | NO: 1094 | 1095 | 1096 | QVQLVESGGGWRPGGSLRLSCAASGFTFDDYGMSWVRQSPGK |
| | DYGMS | GISRNGGSA | EKYSSGWSY | GLEWVSGISRNGGSAGYSDSAKDRFTISRDNAKNSLYLQMNSLRA |
| | | GYSDSAKD | DDFDI | DDTAMYYCAREKYSSGWSYDDFDIWGQGTMVTVSS |
| PD2. | SEQ ID NO: | SEQ ID NO: | SEQ ID NO: | SEQ ID NO: 1101 |
| 4 | 1098 | 1099 | 1100 | QVQLVESGGGWRPGGSLRLSCAASGFTFDDYGMSWVRQPPGK |
| | DYGMS | GISRNGGSA | EKYSSGWSY | GLEWVSGISRNGGSAGYSDSAKDRFTISRDNAKNSLYLQMNSLRA |
| | | GYSDSAKD | DDFDI | DDTAMYYCAREKYSSGWSYDDFDIWGQGTMVTVSS |
| PD2. | SEQ ID NO: | SEQ ID NO: | SEQ ID NO: | SEQ ID NO: 1105 |
| 5 | 1102 | 1103 | 1104 | EVQLVESGGGVVRPGGSLRLSCAASGFTFDDYGMSWVRQPPGK |
| | DYGMS | GISRNGGSA | EKYSSGWSY | GLEWVSGISRNGGSAGYSDSAKDRFTISRDNAKNSLYLQMNSLRA |
| | | GYSDSAKD | DDFDI | DDTAMYYCAREKYSSGWSYDDFDIWGQGTMVTVSS |
| PD | SEQ ID NO: | SEQ ID NO: | SEQ ID NO: | SEQ ID NO: 1109 |
| 2.6 | 1106 | 1107 | 1108 | QVQLVESGGGWRLGGSLRLSCAASGFSFVDYGMSWVRQAPGQ |
| | DYGMS | GISRNGGST | DPYSSGWSY | GLEWVSGISRNGGSTGYADSVKDRFTISRDNAKNTLYLQMNSLRA |
| | | GYADSVKD | DSFDI | EDTALYYCARDPYSSGWSYDSFDIWGQGTMVTVSS |
| PD | SEQ ID NO: | SEQ ID NO: | SEQ ID NO: | SEQ ID NO: 1113 |
| 2.7 | 1110 | 1111 | 1112 | QVQLVESGGGWRPGGSLRLSCAASGFTFDDYGMSWVRQAPGK |
| | DYGMS | GISRNGGST | EKYSSGWSY | GLEWVSGISRNGGSTGYTASVKDRFTISRDNAKNSLYLQMNSLRA |
| | | GYTASVKD | DDFDI | DDTAMYYCAREKYSSGWSYDDFDIWGQGTMVTVSS |
| PD | SEQ ID NO: | SEQ ID NO: | SEQ ID NO: | SEQ ID NO: 1117 |
| 2.8 | 1114 | 1115 | 1116 | QVQLVESGGGLVQPGGSLRLSCAASGFTFDDYAMSWVRQAPGK |
| | DYAMS | GISWNGGSA | DPHSSAWSY | GLEWVSGISWNGGSAGYADSVKDRFTISRDNAKNSLYLQMNSLR |
| | | GYADSVKD | DAFDI | AEDTALYYCARDPHSSAWSYDAFDIWGQGTMVTVSS |
| PD | SEQ ID NO: | SEQ ID NO: | SEQ ID NO: | SEQ ID NO: 1121 |
| 2.9 | 1118 | 1119 | 1120 | QVQLVESGGGWRPGGSLRLSCAASGFTFDDYAMSWVRQAPGK |
| | DYAMS | GISWNGGSK | DPYSGAWSY | GLEWVSGISWNGGSKGYADSVKDRFTISRDNAKNSLYLQMNSLR |
| | | GYADSVKD | DAFDI | AEDTALYYCARDPYSGAWSYDAFDIWGQGTMVTVSS |
| PD | SEQ ID NO: | SEQ ID NO: | SEQ ID NO: | SEQ ID NO: 1125 |
| 2.10 | 1122 | 1123 | 1124 | QVQLVESGGGWRPGGSLRLSCAASGFTFDDYAMSWVRQAPGK |
| | DYAMS | GISWNGGST | DPYSGAWSY | GLEWVSGISWNGGSTGYADSVKDRFTISRDNAKNSLYLQMNSLR |
| | | GYADSVKD | DAFDI | AEDTALYYCARDPYSGAWSYDAFDIWGQGTMVTVSS |
| PD | SEQ ID NO: | SEQ ID NO: | SEQ ID NO: | SEQ ID NO: 1129 |
| 2.11 | 1126 | 1127 | 1128 | QVQLVESGGGWRPGGSLRLSCAASGFTFDNYAMSWVRQAPGK |
| | NYAMS | GITWNGGST | DKYSYAWSY | GLEWVSGITWNGGSTGYADSVKDRFTISRDNAKNSLYLQMNSLR |
| | | GYADSVKD | DTFDI | AEDTALYYCARDKYSYAWSYDTFDIRGQGTMVTVSS |
| PD | SEQ ID NO: | SEQ ID NO: | SEQ ID NO: | SEQ ID NO: 1133 |
| 2.12 | 1130 | 1131 | 1132 | EVQLVESGGGVVRPGGSLRLSCAASGFTFDDYAMSWVRQAPGK |
| | DYAMS | GITWNAGST | DKYSYAWSY | GLEWVSGITWNAGSTGYADSVKGRFTISRDNAKNSLYLQMNSLR |
| | | GYADSVKG | DDFDI | AEDTALYYCVRDKYSYAWSYDDFDIWGQGTMVTVSS |
| PD | SEQ ID NO: | SEQ ID NO: | SEQ ID NO: | SEQ ID NO: 1137 |
| 2.13 | 1134 | 1135 | 1136 | EVQLVESGGGVVRPGGSLRLSCAASGFTFDDYAMSWVRQAPGK |
| | DYAMS | GITWNRGST | DKYSYAWSY | GLEWVSGITWNRGSTGYADSVKGRFTISRDNAKNSLYLQMNSLR |
| | | GYADSVKG | DDFDI | AEDTALYYCVRDKYSYAWSYDDFDIWGQGTMVTVSS |
| PD | SEQ ID NO: | SEQ ID NO: | SEQ ID NO: | SEQ ID NO: 1141 |
| 2.14 | 1138 | 1139 | 1140 | EVQLVESGGGVVRPGGSLRLSCAASGFTFDDYAFSWVRQAPGKG |
| | DYAFS | GITWNGGST | DKYSYAWSY | LEWVSGITWNGGSTGYADSVKGRFTISRDNAKNSLYLQMNSLRA |
| | | GYADSVKG | DGFDI | EDTALYYCVRDKYSYAWSYDGFDIWGQGTMVTVSS |
| PD | SEQ ID NO: | SEQ ID NO: | SEQ ID NO: | SEQ ID NO: 1145 |
| 2.15 | 1142 | 1143 | 1144 | EVQLVESGGGVVRPGGSLRLSCAASGFTFDDYAQSWVRQAPGK |
| | DYAQS | GITWNGGST | DKYSYAWSY | GLEWVSGITWNGGSTGYADSVKGRFTISRDNAKNSLYLQMNSLR |
| | | GYADSVKG | DGFDI | AEDTALYYCVRDKYSYAWSYDGFDIWGQGTMVTVSS |
| PD | SEQ ID NO: | SEQ ID NO: | SEQ ID NO: | SEQ ID NO: 1149 |
| 2.16 | 1146 | 1147 | 1148 | EVQLVESGGGVVRPGGSLRLSCAASGFTFDDYANSWVRQAPGK |
| | DYANS | GITWNGGST | DKYSYAWSY | GLEWVSGITWNGGSTGYADSVKGRFTISRDNAKNSLYLQMNSLR |
| | | GYADSVKG | DGFDI | AEDTALYYCVRDKYSYAWSYDGFDIWGQGTMVTVSS |
| PD | SEQ ID NO: | SEQ ID NO: | SEQ ID NO: | SEQ ID NO: 1153 |
| 2.17 | 1150 | 1151 | 1152 | EVQLVESGGGVVRPGGSLRLSCAASGFTFDDYAGSWVRQAPGK |
| | DYAGS | GITWNGGST | DKYSYAWSY | GLEWVSGITWNGGSTGYADSVKGRFTISRDNAKNSLYLQMNSLR |
| | | GYADSVKG | DGFDI | AEDTALYYCVRDKYSYAWSYDGFDIWGQGTMVTVSS |
| PD | SEQ ID NO: | SEQ ID NO: | SEQ ID NO: | SEQ ID NO: 1157 |
| 2.18 | 1154 | 1155 | 1156 | EVQLVESGGGVVRPGGSLRLSCAASGFTFDDYAESWVRQAPGKG |
| | DYAES | GITWNGGST | DKYSYAWSY | LEWVSGITWNGGSTGYADSVKGRFTISRDNAKNSLYLQMNSLRA |
| | | GYADSVKG | DGFDI | EDTALYYCVRDKYSYAWSYDGFDIWGQGTMVTVSS |
| PD | SEQ ID NO: | SEQ ID NO: | SEQ ID NO: | SEQ ID NO: 1161 |
| 2.19 | 1158 | 1159 | 1160 | EVQLVESGGGVVRPGGSLRLSCAASGFTFDDYAWSWVRQAPGK |
| | DYAWS | GITWNGGST | DKYSYAWSY | GLEWVSGITWNGGSTGYADSVKGRFTISRDNAKNSLYLQMNSLR |
| | | GYADSVKG | DGFDI | AEDTALYYCVRDKYSYAWSYDGFDIWGQGTMVTVSS |
| PD | SEQ ID NO: | SEQ ID NO: | SEQ ID NO: | SEQ ID NO: 1165 |
| 2.20 | 1162 | 1163 | 1164 | EVQLVESGGGVVRPGGSLRLSCAASGFTFDDYAVSWVRQAPGKG |
| | DYAVS | GITWNGGST | DKYSYAWSY | LEWVSGITWNGGSTGYADSVKGRFTISRDNAKNSLYLQMNSLRA |
| | | GYADSVKG | DGFDI | EDTALYYCVRDKYSYAWSYDGFDIWGQGTMVTVSS |
| PD | SEQ ID NO: | SEQ ID NO: | SEQ ID NO: | SEQ ID NO: 1169 |
| 2.21 | 1166 | 1167 | 1168 | EVQLVESGGGVVRPGGSLRLSCAASGFTFDDYALSWVRQAPGKG |
| | DYALS | GITWNGGST | DKYSYAWSY | LEWVSGITWNGGSTGYADSVKGRFTISRDNAKNSLYLQMNSLRA |
| | | GYADSVKG | DGFDI | EDTALYYCVRDKYSYAWSYDGFDIWGQGTMVTVSS |
| PD | SEQ ID NO: | SEQ ID NO: | SEQ ID NO: | SEQ ID NO: 1173 |
| 2.22 | 1170 | 1171 | 1172 | EVQLVESGGGVVRPGGSLRLSCAASGFTFDDYASSWVRQAPGKG |
| | DYASS | GITWNGGST | DKYSYAWSY | LEWVSGITWNGGSTGYADSVKGRFTISRDNAKNSLYLQMNSLRA |
| | | GYADSVKG | DGFDI | EDTALYYCVRDKYSYAWSYDGFDIWGQGTMVTVSS |
| PD | SEQ ID NO: | SEQ ID NO: | SEQ ID NO: | SEQ ID NO: 1177 |
| 2.23 | 1174 | 1175 | 1176 | EVQLVESGGGVVRPGGSLRLSCAASGFTFDDYARSWVRQAPGKG |
| | DYARS | GITWNGGST | DKYSYAWSY | LEWVSGITWNGGSTGYADSVKGRFTISRDNAKNSLYLQMNSLRA |
| | | GYADSVKG | DGFDI | EDTALYYCVRDKYSYAWSYDGFDIWGQGTMVTVSS |
| PD | SEQ ID NO: | SEQ ID NO: | SEQ ID NO: | SEQ ID NO: 1181 |
| 2.24 | 1178 | 1179 | 1180 | EVQLVESGGGVVRPGGSLRLSCAASGFTFDDYAMSWVRQAPGK |
| | DYAMS | GITWNSGST | DKYSYAWSY | GLEWVSGITWNSGSTGYADSVKDRFTISRDNAKNSLYLQMNSLR |
| | | GYADSVKD | DDFDI | AEDTALYYCVRDKYSYAWSYDDFDIWGQGTMVTVSS |
| PD | SEQ ID NO: | SEQ ID NO: | SEQ ID NO: | SEQ ID NO: 1185 |
| 2.25 | 1182 | 1183 | 1184 | EVQLVESGGGVVRPGGSLRLSCAASGFTFDDYAMSWVRQAPGK |
| | DYAMS | GITWNQGST | DKYSYAWSY | GLEWVSGITWNQGSTGYADSVKDRFTISRDNAKNSLYLQMNSLR |
| | | GYADSVKD | DDFDI | AEDTALYYCVRDKYSYAWSYDDFDIWGQGTMVTVSS |
| PD | SEQ ID NO: | SEQ ID NO: | SEQ ID NO: | SEQ ID NO: 1189 |
| 2.26 | 1186 | 1187 | 1188 | EVQLVESGGGVVRPGGSLRLSCAASGFTFDDYAMSWVRQAPGK |
| | DYAMS | GITWNHGST | DKYSYAWSY | GLEWVSGITWNHGSTGYADSVKDRFTISRDNAKNSLYLQMNSLR |
| | | GYADSVKD | DVFDI | AEDTALYYCVRDKYSYAWSYDVFDIWGQGTMVTVSS |
| PD | SEQ ID NO: | SEQ ID NO: | SEQ ID NO: | SEQ ID NO: 1193 |
| 2.27 | 1190 | 1191 | 1192 | EVQLVESGGGVVRPGGSLRLSCAASGFTFDDYAMSWVRQAPGK |
| | DYAMS | GITWNAGST | DKYSYAWSY | GLEWVSGITWNAGSTGYADSVKDRFTISRDNAKNSLYLQMNSLR |
| | | GYADSVKD | DDFDI | AEDTALYYCVRDKYSYAWSYDDFDIWGQGTMVTVSS |
| PD | SEQ ID NO: | SEQ ID NO: | SEQ ID NO: | SEQ ID NO: 1197 |
| 2.28 | 1194 | 1195 | 1196 | EVQLVESGGGVVRPGGSLRLSCAASGFTFDDYAMSWVRQAPGK |
| | DYAMS | GITWNGGST | DKYSYAWSY | GLEWVSGITWNGGSTGYADSVKGRFTISRDNAKNSLYLQMNSLR |
| | | GYADSVKG | DVFDI | AEDTALYYCVRDKYSYAWSYDVFDIWGQGTMVTVSS |
| PD | SEQ ID NO: | SEQ ID NO: | SEQ ID NO: | SEQ ID NO: 1201 |
| 2.29 | 1198 | 1199 | 1200 | EVQLVESGGGVVRPGGSLRLSCAASGFTFDDYAMSWVRQAPGK |
| | DYAMS | GITWNGGST | DKYSYAWSY | GLEWVSGITWNGGSTGYADSVKGRFTISRDNAKNSLYLQMNSLR |
| | | GYADSVKG | DDFDI | AEDTALYYCVRDKYSYAWSYDDFDIWGQGTMVTVSS |
| PD | SEQ ID NO: | SEQ ID | SEQ ID NO: | SEQ ID NO: 1205 |
| 2.30 | 1202 | N0:1203 | 1204 | EVQLVESGGGVVRPGGSLRLSCAASGFTFDDYAMSWVRQAPGK |
| | DYAMS | GITWNKGST | DKYSYAWSY | GLEWVSGITWNKGSTGYADSVKDRFTISRDNAKNSLYLQMNSLR |
| | | GYADSVKD | DDFDI | AEDTALYYCVRDKYSYAWSYDDFDIWGQGTMVTVSS |
| PD | SEQ ID NO: | SEQ ID NO: | SEQ ID NO: | SEQ ID NO: 1209 |
| 2.31 | 1206 | 1207 | 1208 | EVQLVESGGGVVRPGGSLRLSCAASGFTFDDYAMSWVRQAPGK |
| | DYAMS | GITWNRGST | DKYSYAWSY | GLEWVSGITWNRGSTGYADSVKDRFTISRDNAKNSLYLQMNSLR |
| | | GYADSVKD | DDFDI | AEDTALYYCVRDKYSYAWSYDDFDIWGQGTMVTVSS |
| PD | SEQ ID NO: | SEQ ID NO: | SEQ ID NO: | SEQ ID NO: 1213 |
| 2.32 | 1210 | 1211 | 1212 | EVQLVESGGGVVRPGGSLRLSCAASGFTFDDYAISWVRQAPGKG |
| | DYAIS | GITWNGGST | DKYSYAWSY | LEWVSGITWNGGSTGYADSVKDRFTISRDNAKNSLYLQMNSLRA |
| | | GYADSVKD | DGFDI | EDTALYYCVRDKYSYAWSYDGFDIWGQGTMVTVSS |
| PD | SEQ ID NO: | SEQ ID NO: | SEQ ID NO: | SEQ ID NO: 1217 |
| 2.33 | 1214 | 1215 | 1216 | EVQLVESGGGVVRPGGSLRLSCAASGFTFDDYATSWVRQAPGKG |
| | DYATS | GITWNGGST | DKYSYAWSY | LEWVSGITWNGGSTGYADSVKDRFTISRDNAKNSLYLQMNSLRA |
| | | GYADSVKD | DGFDI | EDTALYYCVRDKYSYAWSYDGFDIWGQGTMVTVSS |
| PD | SEQ ID NO: | SEQ ID NO: | SEQ ID NO: | SEQ ID NO: 1221 |
| 2.34 | 1218 | 1219 | 1220 | EVQLVESGGGVVRPGGSLRLSCAASGFTFDDYANSWVRQAPGK |
| | DYANS | GITWNGGST | DKYSYAWSY | GLEWVSGITWNGGSTGYADSVKDRFTISRDNAKNSLYLQMNSLR |
| | | GYADSVKD | DGFDI | AEDTALYYCVRDKYSYAWSYDGFDIWGQGTMVTVSS |
| PD | SEQ ID | SEQ ID NO: | SEQ ID NO: | SEQ ID NO: 1225 |
| 2.35 | NO:1222 | 1223 | 1224 | EVQLVESGGGVVRPGGSLRLSCAASGFTFDDYADSWVRQAPGKG |
| | DYADS | GITWNGGST | DKYSYAWSY | LEWVSGITWNGGSTGYADSVKDRFTISRDNAKNSLYLQMNSLRA |
| | | GYADSVKD | DGFDI | EDTALYYCVRDKYSYAWSYDGFDIWGQGTMVTVSS |
| PD | SEQ ID NO: | SEQ ID NO: | SEQ ID NO: | SEQ ID NO: 1229 |
| 2.36 | 1226 | 1227 | 1228 | EVQLVESGGGVVRPGGSLRLSCAASGFTFDDYASSWVRQAPGKG |
| | DYASS | GITWNGGST | DKYSYAWSY | LEWVSGITWNGGSTGYADSVKDRFTISRDNAKNSLYLQMNSLRA |
| | | GYADSVKD | DGFDI | EDTALYYCVRDKYSYAWSYDGFDIWGQGTMVTVSS |
| PD | SEQ ID NO: | SEQ ID NO: | SEQ ID NO: | SEQ ID NO: 1233 |
| 2.37 | 1230 | 1231 | 1232 | EVQLVESGGGVVRPGGSLRLSCAASGFTFDDYALSWVRQAPGKG |
| | DYALS | GITWNGGST | DKYSYAWSY | LEWVSGITWNGGSTGYADSVKDRFTISRDNAKNSLYLQMNSLRA |
| | | GYADSVKD | DGFDI | EDTALYYCVRDKYSYAWSYDGFDIWGQGTMVTVSS |
| PD | SEQ ID NO: | SEQ ID NO: | SEQ ID NO: | SEQ ID NO: 1237 |
| 2.38 | 1234 | 1235 | 1236 | EVQLVESGGGVVRPGGSLRLSCAASGFTFDDYAGSWVRQAPGK |
| | DYAGS | GITWNGGST | DKYSYAWSY | GLEWVSGITWNGGSTGYADSVKDRFTISRDNAKNSLYLQMNSLR |
| | | GYADSVKD | DGFDI | AEDTALYYCVRDKYSYAWSYDGFDIWGQGTMVTVSS |
| PD | SEQ ID NO: | SEQ ID NO: | SEQ ID NO: | SEQ ID NO: 1241 |
| 2.39 | 1238 | 1239 | 1240 | EVQLVESGGGVVRPGGSLRLSCAASGFTFDDYAESWVRQAPGKG |
| | DYAES | GITWNGGST | DKYSYAWSY | LEWVSGITWNGGSTGYADSVKDRFTISRDNAKNSLYLQMNSLRA |
| | | GYADSVKD | DGFDI | EDTALYYCVRDKYSYAWSYDGFDIWGQGTMVTVSS |
| PD | SEQ ID NO: | SEQ ID NO: | SEQ ID NO: | SEQ ID NO: 1245 |
| 2.40 | 1242 | 1243 | 1244 | EVQLVESGGGVVRPGGSLRLSCAASGFTFDDYAWSWVRQAPGK |
| | DYAWS | GITWNGGST | DKYSYAWSY | GLEWVSGITWNGGSTGYADSVKDRFTISRDNAKNSLYLQMNSLR |
| | | GYADSVKD | DGFDI | AEDTALYYCVRDKYSYAWSYDGFDIWGQGTMVTVSS |
| PD | SEQ ID NO: | SEQ ID NO: | SEQ ID NO: | SEQ ID NO: 1249 |
| 2.41 | 1246 | 1247 | 1248 | EVQLVESGGGVVRPGGSLRLSCAASGFTFDDYARSWVRQAPGKG |
| | DYARS | GITWNGGST | DKYSYAWSY | LEWVSGITWNGGSTGYADSVKDRFTISRDNAKNSLYLQMNSLRA |
| | | GYADSVKD | DGFDI | EDTALYYCVRDKYSYAWSYDGFDIWGQGTMVTVSS |
| PD | SEQ ID NO: | SEQ ID NO: | SEQ ID NO: | SEQ ID NO: 1253 |
| 2.42 | 1250 | 1251 | 1252 | EVQLVESGGGVVRPGGSLRLSCAASGFTFDDYAFSWVRQAPGKG |
| | DYAFS | GITWNGGST | DKYSYAWSY | LEWVSGITWNGGSTGYADSVKDRFTISRDNAKNSLYLQMNSLRA |
| | | GYADSVKD | DGFDI | EDTALYYCVRDKYSYAWSYDGFDIWGQGTMVTVSS |
| PD | SEQ ID NO: | SEQ ID NO: | SEQ ID NO: | SEQ ID NO: 1257 |
| 2.43 | 1254 | 1255 | 1256 | EVQLVESGGGVVRPGGSLRLSCAASGFTFDDYAVSWVRQAPGKG |
| | DYAVS | GITWNGGST | DKYSYAWSY | LEWVSGITWNGGSTGYADSVKDRFTISRDNAKNSLYLQMNSLRA |
| | | GYADSVKD | DGFDI | EDTALYYCVRDKYSYAWSYDGFDIWGQGTMVTVSS |
| PD | SEQ ID NO: | SEQ ID NO: | SEQ ID NO: | SEQ ID NO: 1261 |
| 2.44 | 1258 | 1259 | 1260 | EVQLVESGGGVVRPGGSLRLSCAASGFTFDDYAMSWVRQAPGK |
| | DYAMS | GITWTGGST | DKYSYAWSY | GLEWVSGITWTGGSTGYADSVKDRFTISRDNAKNSLYLQMNSLR |
| | | GYADSVKD | DGFDI | AEDTALYYCVRDKYSYAWSYDGFDIWGQGTMVTVSS |
| PD | SEQ ID NO: | SEQ ID NO: | SEQ ID NO: | SEQ ID NO: 1265 |
| 2.45 | 1262 | 1263 | 1264 | EVQLVESGGGVVRPGGSLRLSCAASGFTFDDYAMSWVRQAPGK |
| | DYAMS | GITWSGGST | DKYSYAWSY | GLEWVSGITWSGGSTGYADSVKDRFTISRDNAKNSLYLQMNSLR |
| | | GYADSVKD | DGFDI | AEDTALYYCVRDKYSYAWSYDGFDIWGQGTMVTVSS |
| PD | SEQ ID NO: | SEQ ID NO: | SEQ ID NO: | SEQ ID NO: 1269 |
| 2.46 | 1266 | 1267 | 1268 | EVQLVESGGGVVRPGGSLRLSCAASGFTFDDYAMSWVRQAPGK |
| | DYAMS | GITWPGGST | DKYSYAWSY | GLEWVSGITWPGGSTGYADSVKDRFTISRDNAKNSLYLQMNSLR |
| | | GYADSVKD | DGFDI | AEDTALYYCVRDKYSYAWSYDGFDIWGQGTMVTVSS |
| PD | SEQ ID NO: | SEQ ID NO: | SEQ ID NO: | SEQ ID NO: 1273 |
| 2.47 | 1270 | 1271 | 1272 | EVQLVESGGGVVRPGGSLRLSCAASGFTFDDYAMSWVRQAPGK |
| | DYAMS | GITWIGGST | DKYSYAWSY | GLEWVSGITWIGGSTGYADSVKDRFTISRDNAKNSLYLQMNSLRA |
| | | GYADSVKD | DGFDI | EDTALYYCVRDKYSYAWSYDGFDIWGQGTMVTVSS |
| PD | SEQ ID NO: | SEQ ID NO: | SEQ ID NO: | SEQ ID NO: 1277 |
| 2.48 | 1274 | 1275 | 1276 | EVQLVESGGGVVRPGGSLRLSCAASGFTFDDYAMSWVRQAPGK |
| | DYAMS | GITWLGGST | DKYSYAWSY | GLEWVSGITWLGGSTGYADSVKDRFTISRDNAKNSLYLQMNSLR |
| | | GYADSVKD | DGFDI | AEDTALYYCVRDKYSYAWSYDGFDIWGQGTMVTVSS |
| PD | SEQ ID NO: | SEQ ID NO: | SEQ ID NO: | SEQ ID NO: 1281 |
| 2.49 | 1278 | 1279 | 1280 | EVQLVESGGGVVRPGGSLRLSCAASGFTFDDYAMSWVRQAPGK |
| | DYAMS | GITWNGGST | DKYSYAWSY | GLEWVSGITWNGGSTGYADSVKGRFTISRDNAKNSLYLQMNSLR |
| | | GYADSVKG | DGFDI | AEDTALYYCVRDKYSYAWSYDGFDIWGQGTMVTVSS |
| PD | SEQ ID | SEQ ID NO: | SEQ ID NO: | SEQ ID NO: 1285 |
| 2.50 | NO:1282 | 1283 | 1284 | EVQLVESGGGVVRPGGSLRLSCAASGFTFDDYAMSWVRQAPGK |
| | DYAMS | GITWKGGST | DKYSYAWSY | GLEWVSGITWKGGSTGYADSVKDRFTISRDNAKNSLYLQMNSLR |
| | | GYADSVKD | DGFDI | AEDTALYYCVRDKYSYAWSYDGFDIWGQGTMVTVSS |
| PD | SEQ ID NO: | SEQ ID NO: | SEQ ID NO: | SEQ ID NO: 1289 |
| 2.51 | 1286 | 1287 | 1288 | EVQLVESGGGVVRPGGSLRLSCAASGFTFDDYAMSWVRQAPGK |
| | DYAMS | GITWRGGST | DKYSYAWSY | GLEWVSGITWRGGSTGYADSVKDRFTISRDNAKNSLYLQMNSLR |
| | | GYADSVKD | DGFDI | AEDTALYYCVRDKYSYAWSYDGFDIWGQGTMVTVSS |
| PD | SEQ ID NO: | SEQ ID NO: | SEQ ID NO: | SEQ ID NO: 1293 |
| 2.52 | 1290 | 1291 | 1292 | EVQLVESGGGVVRPGGSLRLSCAASGFTFDDYAMSWVRQAPGK |
| | DYAMS | GITWNGGST | DKYSYAWSY | GLEWVSGITWNGGSTGYADSVKDRFTISRDNAKNSLYLQMNSLR |
| | | GYADSVKD | DVFDI | AEDTALYYCVRDKYSYAWSYDVFDIWGQGTMVTVSS |
| PD | SEQ ID NO: | SEQ ID NO: | SEQ ID NO: | SEQ ID NO: 1297 |
| 2.53 | 1294 | 1295 | 1296 | EVQLVESGGGVVRPGGSLRLSCAASGFTFDDYAMSWVRQAPGK |
| | DYAMS | GITWNGGST | DKYSYAWSY | GLEWVSGITWNGGSTGYADSVKDRFTISRDNAKNSLYLQMNSLR |
| | | GYADSVKD | DDFDI | AEDTALYYCVRDKYSYAWSYDDFDIWGQGTMVTVSS |

[0228] Exemplary nucleic acid sequences are

[0229] SEQ ID NO: 1878 (his encodes PD1.1) and SEQ ID NO: 1879) (this encodes PD2.1).

[0230] In one embodiment, the PD-1 binding V_{H} single domain antibody is a variant of one of the V_{H} single domain antibodies shown in table 9 or 10 which comprises one or more substitution in the amino acid sequence. Typical modifications are explained elsewhere herein. For example, a variant of PD1.1 can have amino acid substitutions at one or more or all of the following positions: 5L, 32H, 44G, 55S, 66D, 77S and/or 105T. In one embodiment, the V_{H} single domain antibody comprises PD1.1 with amino acid substitutions selected from one of the following:
[0231] a) 5L→V, 11S→L, 32H→Y, 44G→D, 55S→G, 62D→A, 66D→G and 77S→N or
[0232] b) 5L→V, 11S→L, 32H→Y, 44G→D, 55S→G, 66D→G and 77S→N or
[0233] c) 1E→Q, 5L→V, 11S→L, 32H→Y, 44G→D, 55S→G, 66D→G, 77S→N, 98R→K, 99E→D, 105T→I and 102M→T.

[0234] In one embodiment, a variant or PD1.29 has amino acid substitutions at one or more or all of the following positions: M34, M58, V102, V116. In one embodiment, the V_{H} single domain antibody comprises SEQ ID No 136 with amino acid substitutions selected from one of the following:

### a) M34→L, M58→Y, V116A (PD 1.39);

### b) M34→F, G54→A, M58→Q, V102A (PD1.50);

### c) V1116A (PD 1.26);

### d) M34→L, M58→Q, V1116A (PD 1.40).

[0235] In one embodiment, the V_{H} single domain antibody comprises PD2.1 with amino acid substitutions at one or more or all of the following positions: G109, D66, G55. In one embodiment, the V_{H} single domain antibody comprises SEQ ID No 254 with amino acid substitutions selected from one of the following:
[0236] a) G109→D, D66→G, G55→A (PD 2.12);
[0237] b) G109→D, G55→A (PD 2.27);
[0238] c) G109→D (PD 2.53);
[0239] d) G109→D, D66→G (PD 2.29);
[0240] e) G109→V, D66→G (PD 2.28).

[0241] In one embodiment, when Q is found at position 1, it is changed to E or another residue. The numbering used above is based on the actual position of the residue in the molecule.

[0242] In one embodiment, the binding molecule may comprise one or more single domain antibodies that bind to PD-1, for example one or two single domain antibodies as described above.

[0243] In one embodiment, the binding molecule may comprise one or more single domain antibodies that bind to PD-1, for example one or two single domain antibodies as described above. In one embodiment the binding molecule comprises two single domain antibodies that bind to PD-1 wherein each binds to a different epitope of PD-1, thus providing a biparatopic PD-1 binder.

### PD-1 Blocking Molecules

[0244] In another embodiment, the PD-1 binding moiety is a single V_{H} domain antibody that blocks the functional interaction between PD-1 and at least one of its ligands, e.g. blocks PD-1 signalling. PD-1 “blocking single domain antibody or antibody” or a “neutralizing single domain antibody or antibody”, as used herein refers to an antibody whose binding to PD-1 results in inhibition of at least one biological activity of PD-1. For example, a single domain antibody of the invention may prevent or block PD-1 binding to PD-L1 and/or PD-L2. In one embodiment, the single domain antibody of the invention blocks PD-1 binding to PD-L1. In one embodiment, the single domain antibody of the invention blocks PD-1 binding to PD-L2.

### Exemplary Sequences of PD-1 Blocking Molecules

[0245] In one aspect, the single variable heavy chain domain antibody comprises a CDR1, CDR2 or CDR3 as shown for one of the single domain antibodies as shown in Table 11 or having a CDR1, 2 or 3 with at least 75% homology thereto; or a set of CDRs (i.e. CDR1, CDR2, CDR3) wherein said set is as shown for one of the single domain antibodies as shown in Table 11 or with at least 75% 80%, 90% or 95% homology thereto.

[0246] In one embodiment, the single variable heavy chain domain antibody comprises a set of CDR1, 2, and 3 sequences as shown for V_{H} single domain antibodies in table 11 or a sequence with at least 75%, 80%, 90% or 95% sequence homology thereto. Thus, in one embodiment, the V_{H} single domain antibody has a CDR1 with SEQ ID NO. 1298, a CDR2 with SEQ ID NO. 1299 and a CDR3 with SEQ ID NO. 1300. In another embodiment, the V_{H} single domain antibody has a CDR1 with SEQ ID NO. 1302, a CDR2 with SEQ ID NO. 1303 and a CDR3 with SEQ ID NO. 1304. In another embodiment, the V_{H} single domain antibody has a CDR1 with SEQ ID NO. 1306, a CDR2 with SEQ ID NO. 1307 and a CDR3 with SEQ ID NO. 1308.

[0247] In another aspect, the single variable heavy chain domain antibody according to the invention comprises or consists of a full length sequence as shown in Table 11 or a sequence with at least 50%, 80%, 90% or 95% homology thereto.

[0248] Sequence homology can be at least 50%, 60%, 70%, 71%, 72%, 73%, 74%, 75%, 76%, 77%, 78%, 79%, 80%, 81%, 82%, 83%, 84%, 85%, 86%, 87%, 88%, 89%, 90%, 91%, 92%, 93%, 94%, 95%, 96%, 97%, 98% or 99% for example at least 90%, 91%, 92%, 93%, 94%, 95%, 96%, 97%, 98% or 99% sequence homology. As mentioned elsewhere, homology and identity are used interchangeably herein and the above values also refer to sequence identity.

TABLE 11
PD-1 blockers

| Name | | | | |
|---|---|---|---|---|
| Blocker | CDR1 | CDR2 | CDR3 | Full length |
| PD1 | SEQ ID | SEQ ID NO: | SEQ ID NO: 1300 | SEQ ID NO: 1301 |
| blocker | NO: | 1299 | EAPLRLGESPHDA | QVQLVESGGGLVKPGGSLRLSCAASGFTFSDYTMTWMRQAP |
| 1.1 | 1298 | YISTGGTIKYY | FDI | GKGLEWVSYISTGGTIKYYTDSVKGRFTISRDNAKNSLYLQMN |
| | DYTMT | TDSVKG | | SLRADDTAVYYCAREAPLRLGESPHDAFDIWGQGTMVTVSS |
| PD1 | SEQ ID | SEQ ID NO: | SEQ ID NO: 1304 | SEQ ID NO: 1305 |
| blocker | NO: | 1303 | EAPLRLGESPHDA | EVQLLESGGGLVKPGGSLRLSCAASGFTFSDYTMTWMRQAP |
| 1.2 | 1302 | YISTGGSIKYY | FDI | GKGLEWVSYISTGGSIKYYTDSVKGRFTISRDNAKNSLYLQMN |
| | DYTMT | TDSVKG | | SLRADDTAVYYCAREAPLRLGESPHDAFDIWGQGTMVTVSS |
| PD1 | SEQ ID | SEQ ID NO: | SEQ ID NO: 1308 | SEQ ID NO: 1309 |
| blocker | NO: | 1307 | EAPLRLGESPHDA | QVQLVESGGGLVKPGGSLRLSCAASGFTFSDYTMTWMRQAP |
| 1.3 | 1306 | YISTGGSIKYY | FDI | GKGLEWVSYISTGGSIKYYTDSVKGRFTISRDNAKNSLYLQMN |
| | DYTMT | TDSVKG | | SLRADDTAVYYCAREAPLRLGESPHDAFDIWGQGTMVTVSS |
| PD1 | SEQ ID | SEQ ID NO: | SEQ ID NO: 1312 | SEQ ID NO: 1313 |
| blocker | NO: | 1311 | EAPLRLGETPHDA | QVQLVESGGGLVKPGGSLRLSCAASGFTFSDYYMIWMRQAP |
| 1.4 | 1310 | YISGGGTTKYY | FDI | GKGLEWVSYISGGGTTKYYTDSVKGRFTISRDNAKNSLYLQMN |
| | DYYMI | TDSVKG | | SLRADDTAVYYCAREAPLRLGETPHDAFDIWGQGTMVTVSS |
| PD1 | SEQ ID | SEQ ID NO: | SEQ ID NO: 1316 | SEQ ID NO: 1317 |
| blocker | NO: | 1315 | EAPLRLGESPHDA | EVQLVESGGGLVKPGGSLRLSCAASGFTFSDYTMTWMRQAP |
| 1.5 | 1314 | YISTGGNTKYY | FDI | GKGLEWVSYISTGGNTKYYTDSVKGRFTISRDNAKNSLYLQMN |
| | DYTMT | TDSVKG | | SLRADDTAVYYCAREAPLRLGESPHDAFDIWGQGTMVTVSS |
| PD1 | SEQ ID | SEQ ID NO: | SEQ ID NO: 1320 | SEQ ID NO: 1321 |
| blocker | NO: | 1319 | EAPLRLGESPHDA | EVQLLESGGGLVKPGGSLRLSCAASGFTFSDYTMTWMRQAP |
| 1.6 | 1318 | YISTGGTIKYY | FDI | GKGLEWVSYISTGGTIKYYTDSVKGRFTISRDNAKNSLYLQMSS |
| | DYTMT | TDSVKG | | LRADDTAVYYCAREAPLRLGESPHDAFDIWGQGTMVTVSS |
| PD1 | SEQ ID | SEQ ID NO: | SEQ ID NO: 1324 | SEQ ID NO: 1325 |
| blocker | NO: | 1323 | EAPLRLGESPHDA | EVQLVESGGGLVKPGGSLRLSCAASGFTFSDYTMTWMRQAP |
| 1.7 | 1322 | YISTGGTIKYY | FDI | GKGLEWVSYISTGGTIKYYTDSVKGRFTISRDNAKNSLYLQMN |
| | DYTMT | TDSVKG | | SLRADDTAVYYCAREAPLRLGESPHDAFDIWGQGTMVTVSS |
| PD1 | SEQ ID | SEQ ID NO: | SEQ ID NO: 1328 | SEQ ID NO: 1329 |
| blocker | NO: | 1327 | EAPLRLGESPHDA | EVQLVESGGGLVKPGGSLRLSCAASGFTFSDYTMTWMRQAP |
| 1.8 | 1326 | YISTGGSIKYY | FDI | GKGLEWVSYISTGGSIKYYTDSVKGRFTISRDNAKNSLYLQMN |
| | DYTMT | TDSVKG | | SLRAGDTAVYYCAREAPLRLGESPHDAFDIWGQGTMVTVSS |
| PD1 | SEQ ID | SEQ ID NO: | SEQ ID NO: 1332 | SEQ ID NO: 1333 |
| blocker | NO: | 1331 | EAPLRLGESPHDA | QVQLVESGGGLVKPGGSLRLSCAASGFTFGDYTMTWMRQAP |
| 1.9 | 1330 | YISTGGTIKYY | FDI | GKGLEWVSYISTGGTIKYYTDSVKGRFTISRDNAKNSLYLQMD |
| | DYTMT | TDSVKG | | SLRADDTAVYYCAREAPLRLGESPHDAFDIWGQGTMVTVSS |
| PD1 | SEQ ID | SEQ ID NO: | SEQ ID NO: 1336 | SEQ ID NO: 1337 |
| blocker | NO: | 1335 | EAPLRLGESPHDA | QVQLVESGGGLVKPGGSLRLSCAASGFTFSDYTMSWMRQAP |
| 1.10 | 1334 | YISLGGNTKYY | FDI | GKGLEWISYISLGGNTKYYTDSVKGRFTISRDNAKNSLYLQMN |
| | DYTMS | TDSVKG | | SLRADDTAVYYCAREAPLRLGESPHDAFDIWGQGTMVTVSS |
| PD1 | SEQ ID | SEQ ID NO: | SEQ ID NO: 1340 | SEQ ID NO: 1341 |
| blocker | NO: | 1339 | EAPLRLGETPHDA | EVQLLESGGGLVKPGGSLRLSCAASGFTFSDYDMTWIRQAPG |
| 1.11 | 1338 | YISRGGSTKYY | FDI | KGQEWVSYISRGGSTKYYADSVKGRFTISRDNAKNSLYLQMN |
| | DYDMT | ADSVKG | | SLRAEDTAVYYCAREAPLRLGETPHDAFDIWGQGTMVTVSS |
| PD1 | SEQ ID | SEQ ID NO: | SEQ ID NO: 1344 | SEQ ID NO: 1345 |
| blocker | NO: | 1343 | EAPLRLGESPHDA | EVQLLESGGGVVKPGGSLRLSCAASGFTFSDYYMGWIRQAPG |
| 1.12 | 1342 | YISSSGSTIYYA | FDI | KGLEWISYISSSGSTIYYADSVKGRFTISRDNAKNSLYLQMNSLR |
| | DYYMG | DSVKG | | AEDTAVYYCAREAPLRLGESPH DAFDIWGQGTMVTVSS |
| PD1 | SEQ ID | SEQ ID NO: | SEQ ID NO: 1348 | SEQ ID NO: 1349 |
| blocker | NO: | 1347 | EAPLRLGESPHDA | EVQLLESGGGLVKPGGSLRLSCAASGFTFSDYTMTWMRQAP |
| 1.13 | 1346 | YISTGGTIKYY | FDI | GKGLEWVSYISTGGTIKYYTDSVKGRFTISRDNAKNSLYLQMN |
| | DYTMT | TDSVKG | | SLRADDTAVYYCAREAPLRLGESPHDAFDIWGQGTMVTVSS |
| PD1 | SEQ ID | SEQ ID NO: | SEQ ID NO: 1352 | SEQ ID NO: 1353 |
| blocker | NO: | 1351 | EAPLRLGESPHDA | EVQLVESGGGLVQPGRSLRLSCAASGFTFSDYTMTWMRQAP |
| 1.14 | 1350 | YISTGGTIKYY | FDI | GKGLEWVSYISTGGTIKYYTDSVKGRFTISRDNAKNSLYLQMN |
| | DYTMT | TDSVKG | | SLRADDTAVYYCAREAPLRLGESPHDAFDIWGQGTMVTVSS |
| PD1 | SEQ ID | SEQ ID NO: | SEQ ID NO: 1356 | SEQ ID NO: 1357 |
| blocker | NO: | 1355 | EAPLRLGESPHDA | QVQLVESGGGLVKPGGSLRLSCAASGFTFSDNSMSWIRQAPG |
| 1.15 | 1354 | YISSSGSTIYYA | FDI | KGLEWVSYISSSGSTIYYADSVKGRFTISRDNAKNSLYLQMNTL |
| | DNSMS | DSVKG | | RAEDTAVYYCAKEAPLRLGESPH DAFDIWGQGTMVTVSS |
| PD1 | SEQ ID | SEQ ID NO: | SEQ ID NO: 1360 | SEQ ID NO: 1361 |
| blocker | NO: | 1359 | EAPLRLGESPHDA | EVQLVESGGGLVKPGGSLRLSCAASGFTFSDYTMSWMRQAP |
| 1.16 | 1358 | YISTGGSIKYY | FDI | GKGLEWVSYISTGGSIKYYTDSVKGRFTISRDNAKNSLYLQMN |
| | DYTMS | TDSVKG | | SLRADDTAVYYCAREAPLRLGESPHDAFDIWGQGTMVTVSS |
| PD1 | SEQ ID | SEQ ID NO: | SEQ ID NO: 1364 | SEQ ID NO: 1365 |
| blocker | NO: | 1363 | EAPLRLGESPHDA | EVQLVESGGGLVKPGGSLRLSCAASGFTFSDYTMTWMRQAP |
| 1.17 | 1362 | YISTGGSIKYY | FDI | GKGLEWVSYISTGGSIKYYTDSVKGRFTISRDNAKNSLYLQMN |
| | DYTMT | TDSVKG | | SLRVDDTAVYYCAREAPLRLGESPHDAFDIWGQGTMVTVSS |
| PD1 | SEQ ID | SEQ ID NO: | SEQ ID NO: 1368 | SEQ ID NO: 1369 |
| blocker | NO: | 1367 | EAPLRLGESPHDA | QVQLLESGGGLVKPGGSLRLSCAASGFTFSDYTMTWMRQAP |
| 1.18 | 1366 | YISTGGTIKYY | FDI | GKGLEWVSYISTGGTIKYYTDSVKGRFTISRDNAKNSLYLQMN |
| | DYTMT | TDSVKG | | SLRADDTAVYYCAREAPLRLGESPHDAFDIWGQGTMVTVSS |
| PD1 | SEQ ID | SEQ ID NO: | SEQ ID NO: 1372 | SEQ ID NO: 1373 |
| blocker | NO: | 1371 | EAPLRLGETPHDA | QVQLVESGGGLVKPGGSLRLSCAASGFTFSDYTMTWMRQAP |
| 1.19 | 1370 | YISTGGSIKYY | FDI | GKGLEWVSYISTGGSIKYYTDSVKGRFTISRDNAKNSLYLQMN |
| | DYTMT | TDSVKG | | SLRAEDTAVYYCAREAPLRLGETPHDAFDIWGQGTMVTVSS |
| PD1 | SEQ ID | SEQ ID NO: | SEQ ID NO: 1376 | SEQ ID NO: 1377 |
| blocker | NO: | 1375 | EAPLRLGESPHDA | EVQLLESGGGLVKPGGSLRLSCAASGFTFSDYTMTWMRQAP |
| 1.20 | 1374 | YISSGGSIKFY | FDI | GKGLEWVSYISSGGSIKFYADSVKGRFTISRDNAKNSLYLQMN |
| | DYTMT | ADSVKG | | SLRAEDTAVYYCAREAPLRLGESPHDAFDIWGQGTMVTVSS |
| PD1 | SEQ ID | SEQ ID NO: | SEQ ID NO: 1380 | SEQ ID NO: 1381 |
| blocker | NO: | 1379 | EAPLRLGESPHDA | EVQLVESGGGLVKPGGSLRLSCAASGFTFSDYTMTWMRQAP |
| 1.21 | 1378 | YISTGGSIKYY | FDT | GKGLEWVSYISTGGSIKYYTDSVKGRFTISRDNAKNSLYLQMN |
| | DYTMT | TDSVKG | | SLRADDTAVYYCAREAPLRLGESPHDAFDTWGQGTMVTVSS |
| PD1 | SEQ ID | SEQ ID NO: | SEQ ID NO: 1384 | SEQ ID NO: 1385 |
| blocker | NO: | 1383 | EAPLRLGESPHDA | EVQLVESGGGLVKPGGSLRLSCAASGFTFSDYTMTWMRQAP |
| 1.22 | 1382 | YISTGGSIKYY | FDI | GKGLEWVSYISTGGSIKYYTDSVKGRFTISRDNAKNSLYLQMN |
| | DYTMT | TDSVKG | | SLRADDTAVYYCAREAPLRLGESPHDAFDIWGQGTMVTVSS |
| PD1 | SEQ ID | SEQ ID NO: | SEQ ID NO: 1388 | SEQ ID NO: 1389 |
| blocker | NO: | 1387 | EAPLRLGESPHDA | QITLKESGGGLVKPGGSLRLSCAASGFTFSDYTMSWMRQAPG |
| 1.23 | 1386 | YISTGGTIKYY | FDI | KGLEWVSYISTGGTIKYYTDSVKGRFTISRDNAKNSLYLQMNSL |
| | DYTMS | TDSVKG | | RADDTAVYYCAREAPLRLGESPHDAFDIWGQGTMVTVSS |
| PD1 | SEQ ID | SEQ ID NO: | SEQ ID NO: | SEQ ID NO: 1393 |
| blocker | NO: | 1391 | 1392 | QVTLKESGGGLVKPGGSLRLSCAASGFTFSDYDMYWIRQAPG |
| 1.24 | 1390 | YISRGGSVTYY | EAPLRLGETPHAA | KGLEWVSYISRGGSVTYYADSVKGRFTISRDNAKNALYLQMNS |
| | DYDMY | ADSVKG | FDI | LRAEDMAVYFCATEAPLRLGETPHAAFDIWGQGTMVTVSS |
| PD1 | SEQ ID | SEQ ID NO: | SEQ ID NO: 1396 | SEQ ID NO: 1397 |
| blocker | NO: | 1395 | EAPLRLGESPHDA | QVTLKESGGGLVKPGGSLRLSCAASGFTFSDYYMSWFRQAPG |
| 1.25 | 1394 | FISSSGSTTYY | FDF | KEREWISFISSSGSTTYYADSVKGRFTISRDNAKNSLYLQMNSL |
| | DYYMS | ADSVKG | | RAEDTAVYYCAREAPLRLGESPHDAFDFWGQGTMVTVSS |
| PD1 | SEQ ID | SEQ ID NO: | SEQ ID NO: 1400 | SEQ ID NO: 1401 |
| blocker | NO: | 1399 | EAPLRLGESPHDA | QVTLKESGGGLVKPGGSLRLSCAASGFTFSDNSMSWIRQAPG |
| 1.26 | 1398 | YISSSGSTIYYA | FDI | KGLEWVSYISSSGSTIYYADSVKGRFTISRDNAKNSLYLQMNTL |
| | DNSMS | DSVKG | | RAEDTAVYYCAKEAPLRLGESPH DAFDIWGQGTMVTVSS |
| PD1 | SEQ ID | SEQ ID NO: | SEQ ID NO: 1404 | SEQ ID NO: 1405 |
| blocker | NO: | 1403 | EAPLRLGESPHDA | QVTLKESGGGLVKPGGSLRLSCAASGFTFSDYTMTWMRQAP |
| 1.27 | 1402 | YISTGGSIKYY | FDI | GKGLEWVSYISTGGSIKYYTDSVKGRFTISRDNAKNSLYLQMN |
| | DYTMT | TDSVKG | | SLRADDTAVYYCAREAPLRLGESPHDAFDIWGQGTMVTVSS |
| PD1 | SEQ ID | SEQ ID NO: | SEQ ID NO: 1408 | SEQ ID NO: 1409 |
| blocker | NO: | 1407 | EAPLRLGETPHAA | QITLKESGGGLVKPGGSLRLSCAASGFTFSDYDMYWIRQAPGK |
| 1.28 | 1406 | YISRGGSVTYY | FDI | GLEWVSYISRGGSVTYYADSVKGRFTISRDNAKNALYLQMNSL |
| | DYDMY | ADSVKG | | RAEDMAVYFCATEAPLRLGETPHAAFDIWGQGTMVTVSS |
| PD1 | SEQ ID | SEQ ID NO: | SEQ ID NO: 1412 | SEQ ID NO: 1413 |
| blocker | NO: | 1411 | EAPLRLGESPHDA | QVTLKESGGGLVKPGGSLRLSCAASGFTFSDYTMSWMRQAP |
| 1.29 | 1410 | YISTGGTIKYY | FDI | GKGLEWVSYISTGGTIKYYTDSVKGRFTISRDNAKNSLYLQMN |
| | DYTMS | TDSVKG | | SLRADDTAVYYCAREAPLRLGESPHDAFDIWGQGTMVTVSS |
| PD1 | SEQ ID | SEQ ID NO: | SEQ ID NO: 1416 | SEQ ID NO: 1417 |
| blocker | NO: | 1415 | EAPLRLGESPHDA | QVTLKESGGGLVKPGGSLRLSCAASGFTFSDYTMTWMRQAP |
| 1.30 | 1414 | YISTGGSIKYY | FDI | GKGLEWVSYISTGGSIKYYTDSVKGRFTISRDNARNSLYLQMN |
| | DYTMT | TDSVKG | | SLRAEDTAVYYCAREAPLRLGESPHDAFDIWGQGTMVTVSS |
| PD1 | SEQ ID | SEQ ID NO: | SEQ ID NO: 1420 | SEQ ID NO: 1421 |
| blocker | NO: | 1419 | EAPLRLGESPHDA | QVTLKESGGGLVKPGGSLRLSCAASGFTFSDYTMTWMRQAP |
| 1.31 | 1418 | YISTGGSTKYY | FDI | GKGLEWVSYISTGGSTKYYTDSVKGRFTISRDNAKNSLYLQMN |
| | DYTMT | TDSVKG | | SLRADDTAVYYCAREAPLRLGESPHDAFDIWGQGTMVTVSS |
| PD1 | SEQ ID | SEQ ID NO: | SEQ ID NO: 1424 | SEQ ID NO: 1425 |
| blocker | NO: | 1423 | EAPLRLGESPHDA | QVTLKESGGGLVKPGGSLRLSCAASGFTFSDDYMMWIRQAP |
| 1.32 | 1422 | YISSGGSIIYYA | FDI | GKGLEWVSYISSGGSIIYYADSVKGRFTISRDNAKNSLYLQMNS |
| | DDYMM | DSVKG | | LRAEDTAVYYCAREAPLRLGESPHDAFDIRGQGTMVTVSS |
| PD1 | SEQ ID | SEQ ID NO: | SEQ ID NO: 1428 | SEQ ID NO: 1429 |
| blocker | NO: | 1427 | EAPLRLGETPHAA | QITLKESGGGLVKPGGSLRLSCAASGFTFSDYDMYWVRQAPG |
| 1.33 | 1426 | YISRGGSVTYY | FDI | KGLEWVSYISRGGSVTYYADSVKGRFTISRDNAKNALYLQMNS |
| | DYDMY | ADSVKG | | LRAEDMAVYFCATEAPLRLGETPHAAFDIWGQGTMVTVSS |
| PD1 | SEQ ID | SEQ ID NO: | SEQ ID NO: 1432 | SEQ ID NO: 1433 |
| blocker | NO: | 1431 | EAPLRLGESPHDA | EVQLVESGGGLVKPGGSLRLSCAASGFTFSDYTMTWMRQAP |
| 1.34 | 1430 | YISTGGSVKYY | FDI | GKGLEWVSYISTGGSVKYYTDSVKGRFTISRDNAKNSLYLQMN |
| | DYTMT | TDSVKG | | SLRADDTAVYYCAREAPLRLGESPHDAFDIWGQGTMVTVSS |
| PD1 | SEQ ID | SEQ ID NO: | SEQ ID NO: 1436 | SEQ ID NO: 1437 |
| blocker | NO: | 1435 | EAPLRLGESPHDA | EVQLLESGGGLVKPGGSLRLSCAASGFTFSDYTMTWMRQAP |
| 1.35 | 1434 | YISTGGSIKYY | FDI | GKGLEWVSYISTGGSIKYYTDSVKGRFTISRDNAKNSLYLQMN |
| | DYTMT | TDSVKG | | SLRVDDTAVYYCAREAPLRLGESPHDAFDIWGQGTMVTVSS |
| PD1 | SEQ ID | SEQ ID NO: | SEQ ID NO: 1440 | SEQ ID NO: 1441 |
| blocker | NO: | 1439 | EAPLRLGESPHDA | EVQLVESGGGLVKPGGSLRLSCAASGFTFSDYTMTWMRQAP |
| 1.36 | 1438 | YISTGGTIKYY | FDI | GKGLEWVSYISTGGTIKYYTDSVKGRFTISRDNAKNSLFLQMN |
| | DYTMT | TDSVKG | | SLRADDTAVYYCAREAPLRLGESPHDAFDIWGQGTMVTVSS |
| PD1 | SEQ ID | SEQ ID NO: | SEQ ID NO: 1444 | SEQ ID NO: 1445 |
| blocker | NO: | 1443 | EAPLRLGESPHDA | QVQLVESGGGLVKPGGSLRLSCAASGFTFSDYTMTWMRQAP |
| 1.37 | 1442 | YISTGGSIKYY | FDI | GKGLEWVSYISTGGSIKYYTDSVKGRFTISRDNAKNSLFLQMNS |
| | DYTMT | TDSVKG | | LRADDTAVYYCAREAPLRLGESPHDAFDIWGQGTMVTVSS |
| PD1 | SEQ ID | SEQ ID NO: | SEQ ID NO: 1448 | SEQ ID NO: 1449 |
| blocker | NO: | 1447 | EAPLRLGESPHDA | EVQLVESGGGLVQPGGSLRLSCAASGFTFSDYTMTWMRQAP |
| 1.38 | 1446 | YISTGGTIKYY | FDI | GKGLEWVSYISTGGTIKYYTDSVKGRFTISRDNAKNSLYLQMN |
| | DYTMT | TDSVKG | | SLRADDTAVYYCAREAPLRLGESPHDAFDIWGQGTMVTVSS |
| PD1 | SEQ ID | SEQ ID NO: | SEQ ID NO: 1452 | SEQ ID NO: 1453 |
| blocker | NO: | 1451 | EAPLRLGESPHDA | QVQLQESGGGLVKPGGSLRLSCAASGFTFSDYTMTWMRQAP |
| 1.39 | 1450 | YISTGGSIKYY | FDI | GKGLEWVSYISTGGSIKYYTDSVKGRFTISRDNAKNSLYLQMN |
| | DYTMT | TDSVKG | | SLRADDTAVYYCAREAPLRLGESPHDAFDIWGQGTMVTVSS |
| PD1 | SEQ ID | SEQ ID NO: | SEQ ID NO: 1456 | SEQ ID NO: 1457 |
| blocker | NO: | 1455 | EAPLRLGESPHDA | EVQLVESGGGLVKPGGSLRLSCAASGFTFSDSSMSWIRQAPG |
| 1.40 | 1454 | YISSGGGIIYYT | FDI | RGLEWISYISSGGGIIYYTDSVKGRFTISRDNAKNSLYLQMNSLR |
| | DSSMS | DSVKG | | VEDTAVYYCAKEAPLRLGESPHDAFDIWGHGTMVTVSS |
| PD1 | SEQ ID | SEQ ID NO: | SEQ ID NO: 1460 | SEQ ID NO: 1461 |
| blocker | NO: | 1459 | EAPLRLGESPHDA | QVQLVESGGGLVKPGGSLRLSCAASGFTFSDNSMTWMRQAP |
| 1.41 | 1458 | YISSGGGVIFY | FDI | GKGLEWVSYISSGGGVIFYADSVKGRFTISRDNAKNSLYLQMN |
| | DNSMT | ADSVKG | | SLRADDTAVYYCAREAPLRLGESPHDAFDIWGQGTMVTVSS |
| PD1 | SEQ ID | SEQ ID NO: | SEQ ID NO: 1464 | SEQ ID NO: 1465 |
| blocker | NO: | 1463 | EAPLRLGESPHDA | QVQLVESGGGLVKPGGSLRLSCAASGFTFSDNSMTWMRQAP |
| 1.42 | 1462 | YISSGGGVKFY | FDI | GKGLEWVSYISSGGGVKFYADSVKGRFTISRDNAKNSLYLQM |
| | DNSMT | ADSVKG | | NSLRADDTAVYYCAREAPLRLGESPHDAFDIWGQGTMVTVSS |
| PD1 | SEQ ID | SEQ ID NO: | SEQ ID NO: 1468 | SEQ ID NO: 1469 |
| blocker | NO: | 1467 | EAPLRLGESPHDA | QVQLVESGGGLVKPGGSLRLSCAASGFTFSDSSMTWMRQAP |
| 1.43 | 1466 | YISSGGGVIFY | FDI | GKGLEWVSYISSGGGVIFYADSVKGRFTISRDNAKNSLYLQMN |
| | DSSMT | ADSVKG | | SLRADDTAVYYCAREAPLRLGESPHDAFDIWGQGTMVTVSS |
| PD1 | SEQ ID | SEQ ID NO: | SEQ ID NO: 1472 | SEQ ID NO: 1473 |
| blocker | NO: | 1471 | EAPLRLGESPHDA | QVQLVESGGGLVKPGGSLRLSCAASGFTFSDNSMTWMRQAP |
| 1.44 | 1470 | YISSGGAVKFY | FDI | GKGLEWVSYISSGGAVKFYADSVKGRFTISRDNAKNSLYLQM |
| | DNSMT | ADSVKG | | NSLRADDTAVYYCAREAPLRLGESPHDAFDIWGQGTMVTVSS |
| PD1 | SEQ ID | SEQ ID NO: | SEQ ID NO: 1476 | SEQ ID NO: 1477 |
| blocker | NO: | 1475 | EAPLRLGESPHDA | QVQLVESGGGLVKPGGSLRLSCAASGFTFSDYSMSWMRQAP |
| 1.45 | 1474 | YISSGGGVIFY | FDI | GKGLEWVSYISSGGGVIFYADSVKGRFTISRDNAKNSLYLQMN |
| | DYSMS | ADSVKG | | SLRADDTAVYYCAREAPLRLGESPHDAFDIWGQGTMVTVSS |
| PD1 | SEQ ID | SEQ ID NO: | SEQ ID NO: 1480 | SEQ ID NO: 1481 |
| blocker | NO: | 1479 | EAPLRLGESPHDA | QVQLVESGGGLVKPGGSLRLSCAASGFTFSDSSMSWMRQAP |
| 1.46 | 1478 | YISSGGGVIFY | FDI | GKGLEWVSYISSGGGVIFYADSVKGRFTISRDNAKNSLYLQMN |
| | DSSMS | ADSVKG | | SLRADDTAVYYCAREAPLRLGESPHDAFDIWGQGTMVTVSS |
| PD1 | SEQ ID | SEQ ID NO: | SEQ ID NO: 1484 | SEQ ID NO: 1485 |
| blocker | NO: | 1483 | EAPLRLGESPHDA | QVQLVESGGGLVKPGGSLRLSCAASGFTFSDNSMSWMRQAP |
| 1.47 | 1482 | YISSGGGVIFY | FDI | GKGLEWVSYISSGGGVIFYADSVKGRFTISRDNAKNSLYLQMN |
| | DNSMS | ADSVKG | | SLRADDTAVYYCAREAPLRLGESPHDAFDIWGQGTMVTVSS |
| PD1 | SEQ ID | SEQ ID NO: | SEQ ID NO: 1488 | SEQ ID NO: 1489 |
| blocker | NO: | 1487 | EAPLRLGESPHDA | QVQLVESGGGLVKPGGSLRLSCAASGFTFSDSSMTWMRQAP |
| 1.48 | 1486 | YISSGGGVKFY | FDI | GKGLEWVSYISSGGGVKFYADSVKGRFTISRDNAKNSLYLQM |
| | DSSMT | ADSVKG | | NSLRADDTAVYYCAREAPLRLGESPHDAFDIWGQGTMVTVSS |
| PD1 | SEQ ID | SEQ ID NO: | SEQ ID NO: 1492 | SEQ ID NO: 1493 |
| blocker | NO: | 1491 | EAPLRLGESPHDA | QVQLVESGGGLVKPGGSLRLSCAASGFTFSDSSMSWMRQAP |
| 1.49 | 1490 | YISTGGGVKF | FDI | GKGLEWVSYISTGGGVKFYADSVKGRFTISRDNAKNSLYLQM |
| | DSSMS | YADSVKG | | NSLRADDTAVYYCAREAPLRLGESPHDAFDIWGQGTMVTVSS |
| PD1 | SEQ ID | SEQ ID NO: | SEQ ID NO: 1496 | SEQ ID NO: 1497 |
| blocker | NO: | 1495 | EAPLRLGESPHDA | QVQLVESGGGLVKPGGSLRLSCAASGFTFSDNSMTWMRQAP |
| 1.50 | 1494 | YISSGGTIKFY | FDI | GKGLEWVSYISSGGTIKFYADSVKGRFTISRDNAKNSLYLQMN |
| | DNSMT | ADSVKG | | SLRADDTAVYYCAREAPLRLGESPHDAFDIWGQGTMVTVSS |
| PD1 | SEQ ID | SEQ ID NO: | SEQ ID NO: 1500 | SEQ ID NO: 1501 |
| blocker | NO: | 1499 | EAPLRLGESPHDA | QVQLVESGGGLVKPGGSLRLSCAASGFTFSDSSMTWMRQAP |
| 1.51 | 1498 | YISSGGAVKFY | FDI | GKGLEWVSYISSGGAVKFYTDSVKGRFTISRDNAKNSLYLQMN |
| | DSSMT | TDSVKG | | SLRADDTAVYYCAREAPLRLGESPHDAFDIWGQGTMVTVSS |
| PD1 | SEQ ID | SEQ ID NO: | SEQ ID NO: 1504 | SEQ ID NO: 1505 |
| blocker | NO: | 1503 | EAPLRLGESPHDA | QVQLVESGGGLVKPGGSLRLSCAASGFTFSDNSMTWMRQAP |
| 1.52 | 1502 | YISSGGGVKY | FDI | GKGLEWVSYISSGGGVKYYADSVKGRFTISRDNAKNSLYLQM |
| | DNSMT | YADSVKG | | NSLRADDTAVYYCAREAPLRLGESPHDAFDIWGQGTMVTVSS |
| PD1 | SEQ ID | SEQ ID NO: | SEQ ID NO: 1508 | SEQ ID NO: 1509 |
| blocker | NO: | 1507 | EAPLRLGESPHDA | QVQLVESGGGLVKPGGSLRLSCAASGFTFSDNSMTWMRQAP |
| 1.53 | 1506 | YISSGGSVKFY | FDI | GKGLEWVSYISSGGSVKFYADSVKGRFTISRDNAKNSLYLQMN |
| | DNSMT | ADSVKG | | SLRADDTAVYYCAREAPLRLGESPHDAFDIWGQGTMVTVSS |
| PD1 | SEQ ID | SEQ ID NO: | SEQ ID NO: 1512 | SEQ ID NO: 1513 |
| blocker | NO: | 1511 | EAPLRLGESPHDA | QVQLVESGGGLVKPGGSLRLSCAASGFTFSDDSMTWMRQAP |
| 1.54 | 1510 | YISSGGGVIFY | FDI | GKGLEWVSYISSGGGVIFYADSVKGRFTISRDNAKNSLYLQMN |
| | DDSMT | ADSVKG | | SLRADDTAVYYCAREAPLRLGESPHDAFDIWGQGTMVTVSS |
| PD1 | SEQ ID | SEQ ID NO: | SEQ ID NO: 1516 | SEQ ID NO: 1517 |
| blocker | NO: | 1515 | EAPLRLGESPHDA | QVQLVESGGGLVKPGGSLRLSCAASGFTFSDNSMTWMRQAP |
| 1.55 | 1514 | YISSGGGVKFY | FDI | GKGLEWVSYISSGGGVKFYADSVKGRFTISRDNAKNSLYLQM |
| | DNSMT | ADSVKG | | NSLRADDTAVYYCAREAPLRLGESPHDAFDISGQGTMVTVSS |
| PD1 | SEQ ID | SEQ ID NO: | SEQ ID NO: 1520 | SEQ ID NO: 1521 |
| blocker | NO: | 1519 | EAPLRLGESPHDA | QVQLVESGGGLVKPGGSLRLSCAASGFTFSDNSMTWMRQAP |
| 1.56 | 1518 | YISSGGAVKFY | FDI | GKGLEWVSYISSGGAVKFYADSVKGRFTISRDNAKNSLYLQM |
| | DNSMT | ADSVKG | | NSLRADDTAVYYCAREAPLRLGESPHDAFDILGQGTMVTVSS |
| PD1 | SEQ ID | SEQ ID NO: | SEQ ID NO: 1524 | SEQ ID NO: 1525 |
| blocker | NO: | 1523 | EAPLRLGESPHDA | QVQLVESGGGLVKPGGSLRLSCAASGFTFSDNSMTWMRQAP |
| 1.57 | 1522 | YISSGGGVIFY | FDI | GKGLEWVSYISSGGGVIFYADSVKGRFTISRDNAKNSLYLQMN |
| | DNSMT | ADSVKG | | SLRADDTAVYYCAREAPLRLGESPHDAFDISGQGTMVTVSS |
| PD1 | SEQ ID | SEQ ID NO: | SEQ ID NO: 1528 | SEQ ID NO: 1529 |
| blocker | NO: | 1527 | EAPLRLGESPHDA | QVQLVESGGGLVKPGGSLRLSCAASGFTFSDYTMTWMRQAP |
| 1.58 | 1526 | YISTGGGVKF | FDI | GKGLEWVSYISTGGTIKYYTDSVKGRFTISRDNAKNSLYLQMN |
| | DNTMT | YADSVKG | | SLRADDTAVYYCAREAPLRLGESPHDAFDIWGQGTMVTVSS |
| PD1 | SEQ ID | SEQ ID NO: | SEQ ID NO: 1532 | SEQ ID NO: 1533 |
| blocker | NO: | 1531 | EAPLRLGESPHDA | QVQLVESGGGLVKPGGSLRLSCAASGFTFSDNTMTWMRQAP |
| 1.59 | 1530 | YISSGGSVKFY | FDI | GKGLEWVSYISTGGGVKFYADSVKGRFTISRDNAKNSLYLQM |
| | DNSMS | ADSVKG | | NSLRADDTAVYYCAREAPLRLGESPHDAFDIWGQGTMVTVSS |
| PD1 | SEQ ID | SEQ ID NO: | SEQ ID NO: 1536 | SEQ ID NO: 1537 |
| blocker | NO: | 1535 | EAPLRLGESPHDA | QVQLVESGGGLVKPGGSLRLSCAASGFTFSDNSMSWMRQAP |
| 1.60 | 1534 | YISTGGGVKY | FDI | GKGLEWVSYISSGGSVKFYADSVKGRFTISRDNAKNSLYLQMN |
| | DNSMT | YADSVKG | | SLRADDTAVYYCAREAPLRLGESPHDAFDIWGQGTMVTVSS |
| PD1 | SEQ ID | SEQ ID NO: | SEQ ID NO: 1540 | SEQ ID NO: 1541 |
| blocker | NO: | 1539 | EAPLRLGESPHDA | QVQLVESGGGLVKPGGSLRLSCAASGFTFSDNSMTWMRQAP |
| 1.61 | 1538 | YISTGGGVKF | FDI | GKGLEWVSYISTGGGVKYYADSVKGRFTISRDNAKNSLYLQM |
| | DYTMS | YADSVKG | | NSLRADDTAVYYCAREAPLRLGESPHDAFDIWGQGTMVTVSS |
| PD1 | SEQ ID | SEQ ID NO: | SEQ ID NO: 1544 | SEQ ID NO: 1545 |
| blocker | NO: | 1543 | EAPLRLGESPHDA | QVQLVESGGGLVKPGGSLRLSCAASGFTFSDSSMTWMRQAP |
| 1.62 | 1542 | YISSGGAVKFY | FDI | GKGLEWVSYISSGGAVKFYTDSVKGRFTISRDNAKNSLYLQMN |
| | DSSMT | TDSVKG | | SLRADDTAVYYCAREAPLRLGESPHDAFDISGQGTMVTVSS |
| PD1 | SEQ ID | SEQ ID NO: | SEQ ID NO: 1548 | SEQ ID NO: 1549 |
| blocker | NO: | 1547 | EAPLRLGESPHDA | EVQLVESGGGLVKPGGSLRLSCAASGFTFSDSSMTWMRQAP |
| 1.63 | 1546 | YISSGGGVKFY | FDI | GKGLEWVSYISSGGGVKFYTDSVKGRFTISRDNAKNSLYLQMN |
| | DSSMT | TDSVKG | | SLRADDTAVYYCAREAPLRLGESPHDAFDISGQGTMVTVSS |
| PD1 | SEQ ID | SEQ ID NO: | SEQ ID NO: 1552 | SEQ ID NO: 1553 |
| blocker | NO: | 1551 | EAPLRLGESPHDA | EVQLVESGGGLVKPGGSLRLSCAASGFTFSDSSMTWMRQAP |
| 1.64 | 1550 | YISSGGGVKFY | FDI | GKGLEWVSYISSGGGVKFYADSVKGRFTISRDNAKNSLYLQM |
| | DSSMT | ADSVKG | | NSLRADDTAVYYCAREAPLRLGESPHDAFDISGQGTMVTVSS |
| PD1 | SEQ ID | SEQ ID NO: | SEQ ID NO: 1556 | SEQ ID NO: 1557 |
| blocker | NO: | 1555 | EAPLRLGESPHDA | QVQLVESGGGLVKPGGSLRLSCAASGFTFSDSSMTWMRQAP |
| 1.65 | 1554 | YISSGGGVKFY | FDI | GKGLEWVSYISSGGGVKFYADSVKGRFTISRDNAKNSLYLQM |
| | DSSMT | ADSVKG | | NSLRADDTAVYYCAREAPLRLGESPHDAFDISGQGTMVTVSS |
| PD1 | SEQ ID | SEQ ID NO: | SEQ ID NO: 1560 | SEQ ID NO: 1561 |
| blocker | NO: | 1559 | EAPLRLGESPHDA | QVQLVESGGGLVKPGGSLRLSCAASGFTFSDSSMTWMRQAP |
| 1.66 | 1558 | YISSGGGVKFY | FDT | GKGLEWVSYISSGGGVKFYTDSVKGRFTISRDNAKNSLYLQMD |
| | DSSMT | TDSVKG | | SLRADDTAVYYCAREAPLRLGESPHDAFDTSGQGTMVTVSS |
| PD1 | SEQ ID | SEQ ID NO: | SEQ ID NO: 1564 | SEQ ID NO: 1565 |
| blocker | NO: | 1563 | EAPLRLGESPHDA | QVQLVESGGGLVKPGGSLRLSCAASGFTFSGSSMTWMRQAP |
| 1.67 | 1562 | YISSGGGVIFY | FDI | GKGLEWVSYISSGGGVIFYADSVKGRFTISRDNAKNSLYLQMN |
| | GSSMT | ADSVKG | | SLRADDTAVYYCAREAPLRLGESPHDAFDISGQGTMVTVSS |
| PD1 | SEQ ID | SEQ ID NO: | SEQ ID NO: 1568 | SEQ ID NO: 1569 |
| blocker | NO: | 1567 | EAPLRLGESPHDA | QVQLVESGGGLVKPGGSLRLSCAASGFTFGDNSMTWMRQA |
| 1.68 | 1566 | YISSGGGVIFY | FDI | PGKGLEWVSYISSGGGVIFYADSVKGRFTISRDNAKNSLYLQM |
| | DNSMT | ADSVKG | | NSLRADDTAVYYCAREAPLRLGESPHDAFDISGRGTTVTVSS |
| PD1 | SEQ ID | SEQ ID NO: | SEQ ID NO: 1572 | SEQ ID NO: 1573 |
| blocker | NO: | 1571 | EAPLRLGESPHDA | QVQLVESGGGLVKPGGSLRLSCAASGFTFSDNSMSWMRQAP |
| 1.69 | 1570 | YISSGGGVIFY | FDI | GKGLEWVSYISSGGGVIFYADSVKGRFTISRDNAKNSLYLQMN |
| | DNSMS | ADSVKG | | SLRADDTAVYYCAREAPLRLGESPHDAFDISGQGTMVTVSS |
| PD1 | SEQ ID | SEQ ID NO: | SEQ ID NO: 1576 | SEQ ID NO: 1577 |
| blocker | NO: | 1575 | EAPLRLGESPHDA | QVQLVESGGGLVKPGGSLRLSCAASGFTFGDSSMTWMRQAP |
| 1.70 | 1574 | YISSGGAVKFY | FDI | GKGLEWVSYISSGGAVKFYTDSVKGRFTISRDNAKNSLYLQMN |
| | DSSMT | TDSVKG | | SLRADDTAVYYCAREAPLRLGESPHDAFDISGQGTMVTVSS |
| PD1 | SEQ ID | SEQ ID NO: | SEQ ID NO: 1580 | SEQ ID NO: 1581 |
| blocker | NO: | 1579 | EAPLRLGESPHDA | QVQLVESGGGLVKPGGSLRLSCAASGFTFGGSSMTWMRQAP |
| 1.71 | 1578 | YISSGGGVKFY | FDI | GKGLEWVSYISSGGGVKFYTDSVKGRFTISRDNAKNSLYLQMN |
| | GSSMT | TDSVKG | | SLRADDTAVYYCAREAPLRLGESPHDAFDISGQGTMVTVSS |
| PD1 | SEQ ID | SEQ ID NO: | SEQ ID NO: 1584 | SEQ ID NO: 1585 |
| blocker | NO: | 1583 | EAPLRLGESPHDA | QVQLVESGGGLVKPGGSLRLSCAASGFTFSDSSMSWMRQAP |
| 1.72 | 1582 | YISSGGGVIFY | FDI | GKGLEWVSYISSGGGVIFYADSVKGRFTISRDNAKNSLYLQMN |
| | DSSMS | ADSVKG | | SLRADDTAVYYCAREAPLRLGESPHDAFDISGQGTMVTVSS |
| PD1 | SEQ ID | SEQ ID NO: | SEQ ID NO: 1588 | SEQ ID NO: 1589 |
| blocker | NO: | 1587 | EAPLRLGESPHDA | QVQLVESGGGLVKPGGSLRLSCAATGFTFSDSSMTWMRQAP |
| 1.73 | 1586 | YISAGGGVRF | FDI | GKGLEWVSYISAGGGVRFYTDSVKGRFTISRDNAKNSLYLQM |
| | DSSMT | YTDSVKG | | NSLRADDTAVYYCAREAPLRLGESPHDAFDISGQGTMVTVSS |
| PD1 | SEQ ID | SEQ ID NO: | SEQ ID NO: 1592 | SEQ ID NO: 1593 |
| blocker | NO: | 1591 | EAPLRLGESPHDA | EVQLVESGGGLVKPGGSLRLSCAASGFTFSDSSMTWIRQAPG |
| 1.74 | 1590 | YISSGGGVKFY | FDI | KGLEWVSYISSGGGVKFYTDSVKGRFTISRDNAKNSLYLQMNS |
| | DSSMT | TDSVKG | | LRADDTAVYYCAREAPLRLGESPHDAFDISGQGTMVTVSS |
| PD1 | SEQ ID | SEQ ID NO: | SEQ ID NO: 1596 | SEQ ID NO: 1597 |
| blocker | NO: | 1595 | EAPLRLGESPHDA | EVQLVESGGGLVKPGGSLRLSCAASGFTFSDSSMTWIRQAPG |
| 1.75 | 1594 | YISSGGGVKFY | FDI | KGLEWVSYISSGGGVKFYTDSVKGRFTISRDNAKNSLYLQMNS |
| | DSSMT | TDSVKG | | LRAEDTAVYYCAREAPLRLGESPHDAFDISGQGTMVTVSS |
| PD1 | SEQ ID | SEQ ID NO: | SEQ ID NO: 1600 | SEQ ID NO: 1601 |
| blocker | NO: | 1599 | EAPLRLGESPHDA | EVQLVESGGGLVKPGGSLRLSCAASGFTFSDSSMTWIRQAPG |
| 1.76 | 1598 | YISSGGGVKFY | FDI | KGLEWVSYISSGGGVKFYADSVKGRFTISRDNAKNSLYLQMNS |
| | DSSMT | ADSVKG | | LRADDTAVYYCAREAPLRLGESPHDAFDISGQGTMVTVSS |
| PD1 | SEQ ID | SEQ ID NO: | SEQ ID NO: 1604 | SEQ ID NO: 1605 |
| blocker | NO: | 1603 | EAPLRLGESPHDA | EVQLVESGGGLVKPGGSLRLSCAASGFTFSDSSMTWMRQAP |
| 1.77 | 1602 | YISSGGGVKFY | FDI | GKGLEWVSYISSGGGVKFYTDSVKGRFTISRDNAKNSLYLQMN |
| | DSSMT | TDSVKG | | SLRAEDTAVYYCAREAPLRLGESPHDAFDISGQGTMVTVSS |
| PD1 | SEQ ID | SEQ ID NO: | SEQ ID NO: 1608 | SEQ ID NO: 1609 |
| blocker | NO: | 1607 | EAPLRLGESPHDA | EVQLVESGGGLVKPGGSLRLSCAASGFTFSDSSMTWIRQAPG |
| 1.78 | 1606 | YISSGGGVKFY | FDI | KGLEWVSYISSGGGVKFYADSVKGRFTISRDNAKNSLYLQMNS |
| | DSSMT | ADSVKG | | LRAEDTAVYYCAREAPLRLGESPHDAFDISGQGTMVTVSS |
| PD1 | SEQ ID | SEQ ID NO: | SEQ ID NO: 1612 | SEQ ID NO: 1613 |
| blocker | NO: | 1611 | EAPLRLGESPHDA | EVQLVESGGGLVKPGGSLRLSCAASGFTFSDSSMTWKRQAPG |
| 1.79 | 1610 | YISSGGGVKFY | FDI | KGLEWVSYISSGGGVKFYADSVKGRFTISRDNAKNSLYLQMNS |
| | DSSMT | ADSVKG | | LRAEDTAVYYCAREAPLRLGESPHDAFDISGQGTMVTVSS |
| PD1 | SEQ ID | SEQ ID NO: | SEQ ID NO: 1616 | SEQ ID NO: 1617 |
| blocker | NO: | 1615 | EAPLRLGESPHDA | EVQLVESGGGLVKPGGSLRLSCAASGFTFSDSSMTWMRQAP |
| 1.80 | 1614 | YISSGGGVKFY | FDI | GKGLEWVSYISSGGGVKFYADSVKGRFTISRDNAKNSLYLQM |
| | DSSMT | ADSVKG | | NSLRAEDTAVYYCAREAPLRLGESPHDAFDISGQGTMVTVSS |
| PD1 | SEQ ID | SEQ ID NO: | SEQ ID NO: 1620 | SEQ ID NO: 1621 |
| blocker | NO: | 1619 | EAPLRLGESPHDA | EVQLVESGGGLVKPGGSLRLSCAASGFTFSDSSMTWVRQAPG |
| 1.81 | 1618 | YISSGGGVKFY | FDI | KGLEWVSYISSGGGVKFYADSVKGRFTISRDNAKNSLYLQMNS |
| | DSSMT | ADSVKG | | LRAEDTAVYYCAREAPLRLGESPHDAFDISGQGTMVTVSS |
| PD1 | SEQ ID | SEQ ID NO: | SEQ ID NO: 1624 | SEQ ID NO: 1625 |
| blocker | NO: | 1623 | EAPLRLGESPHDA | EVQLVESGGGLVKPGGSLRLSCAASGFTFSDTSMTWMRQAP |
| 1.82 | 1622 | YISSGGGVKFY | FDI | GKGLEWVSYISSGGGVKFYTDSVKGRFTISRDNAKNSLYLQMN |
| | DTSMT | TDSVKG | | SLRAEDTAVYYCAREAPLRLGESPHDAFDISGQGTMVTVSS |
| PD1 | SEQ ID | SEQ ID NO: | SEQ ID NO: 1628 | SEQ ID NO: 1629 |
| blocker | NO: | 1627 | EAPLRLGESPHDA | EVQLVESGGGLVKPGGSLRLSCAASGFTFSDESMTWFRQAPG |
| 1.83 | 1626 | YISSGGGVKFY | FDI | KGLEWVSYISSGGGVKFYTDSVKGRFTISRDNAKNSLYLQMNS |
| | DESMT | TDSVKG | | LRAEDTAVYYCAREAPLRLGESPHDAFDISGQGTMVTVSS |
| PD1 | SEQ ID | SEQ ID NO: | SEQ ID NO: 1632 | SEQ ID NO: 1633 |
| blocker | NO: | 1631 | EAPLRLGESPHDA | EVQLVESGGGLVKPGGSLRLSCAASGFTFSDESMTWMRQAP |
| 1.84 | 1630 | YISSGGGVKFY | FDI | GKGLEWVSYISSGGGVKFYTDSVKGRFTISRDNAKNSLYLQMN |
| | DESMT | TDSVKG | | SLRAEDTAVYYCAREAPLRLGESPHDAFDISGQGTMVTVSS |
| PD1 | SEQ ID | SEQ ID NO: | SEQ ID NO: 1636 | SEQ ID NO: 1637 |
| blocker | NO: | 1635 | EAPLRLGESPHDA | EVQLVESGGGLVKPGGSLRLSCAASGFTFSDYSMTWMRQAP |
| 1.85 | 1634 | YISSGGGVKFY | FDI | GKGLEWVSYISSGGGVKFYTDSVKGRFTISRDNAKNSLYLQMN |
| | DYSMT | TDSVKG | | SLRAEDTAVYYCAREAPLRLGESPHDAFDISGQGTMVTVSS |
| PD1 | SEQ ID | SEQ ID NO: | SEQ ID NO: 1640 | SEQ ID NO: 1641 |
| blocker | NO: | 1639 | EAPLRLGESPHDA | EVQLVESGGGLVKPGGSLRLSCAASGFTFSDASMTWMRQAP |
| 1.86 | 1638 | YISSGGGVKFY | FDI | GKGLEWVSYISSGGGVKFYTDSVKGRFTISRDNAKNSLYLQMN |
| | DASMT | TDSVKG | | SLRAEDTAVYYCAREAPLRLGESPHDAFDISGQGTMVTVSS |
| PD1 | SEQ ID | SEQ ID NO: | SEQ ID NO: 1644 | SEQ ID NO: 1645 |
| blocker | NO: | 1643 | EAPLRLGESPHDA | EVQLVESGGGLVKPGGSLRLSCAASGFTFSDKSMTWMRQAP |
| 1.87 | 1642 | YISSGGGVKFY | FDI | GKGLEWVSYISSGGGVKFYTDSVKGRFTISRDNAKNSLYLQMN |
| | DKSMT | TDSVKG | | SLRAEDTAVYYCAREAPLRLGESPHDAFDISGQGTMVTVSS |
| PD1 | SEQ ID | SEQ ID NO: | SEQ ID NO: 1648 | SEQ ID NO: 1649 |
| blocker | NO: | 1647 | EAPLRLGESPHDA | EVQLVESGGGLVKPGGSLRLSCAASGFTFSDRSMTWMRQAP |
| 1.88 | 1646 | YISSGGGVKFY | FDI | GKGLEWVSYISSGGGVKFYTDSVKGRFTISRDNAKNSLYLQMN |
| | DRSMT | TDSVKG | | SLRAEDTAVYYCAREAPLRLGESPHDAFDISGQGTMVTVSS |
| PD1 | SEQ ID | SEQ ID NO: | SEQ ID NO: 1652 | SEQ ID NO: 1653 |
| blocker | NO: | 1651 | EAPLRLGESPHDA | EVQLVESGGGLVKPGGSLRLSCAASGFTFSDYSMTWMRQAP |
| 1.89 | 1650 | YISSGGGVKFY | FDI | GKGLEWVSYISSGGGVKFYADSVKGRFTISRDNAKNSLYLQM |
| | DYSMT | ADSVKG | | NSLRAEDTAVYYCAREAPLRLGESPHDAFDISGQGTMVTVSS |
| PD1 | SEQ ID | SEQ ID NO: | SEQ ID NO: 1656 | SEQ ID NO: 1657 |
| blocker | NO: | 1655 | EAPLRLGESPHDA | EVQLVESGGGLVKPGGSLRLSCAASGFTFSDVSMTWMRQAP |
| 1.90 | 1654 | YISSGGGVKFY | FDI | GKGLEWVSYISSGGGVKFYADSVKGRFTISRDNAKNSLYLQM |
| | DVSMT | ADSVKG | | NSLRAEDTAVYYCAREAPLRLGESPHDAFDISGQGTMVTVSS |
| PD1 | SEQ ID | SEQ ID NO: | SEQ ID NO: 1660 | SEQ ID NO: 1661 |
| blocker | NO: | 1659 | EAPLRLGESPHDA | EVQLVESGGGLVKPGGSLRLSCAASGFTFSDQSMTWMRQAP |
| 1.91 | 1658 | YISSGGGVKFY | FDI | GKGLEWVSYISSGGGVKFYADSVKGRFTISRDNAKNSLYLQM |
| | DQSMT | ADSVKG | | NSLRAEDTAVYYCAREAPLRLGESPHDAFDISGQGTMVTVSS |
| PD1 | SEQ ID | SEQ ID NO: | SEQ ID NO: 1664 | SEQ ID NO: 1665 |
| blocker | NO: | 1663 | EAPLRLGESPHDA | EVQLVESGGGLVKPGGSLRLSCAASGFTFSDESMTWMRQAP |
| 1.92 | 1662 | YISSGGGVKFY | FDI | GKGLEWVSYISSGGGVKFYADSVKGRFTISRDNAKNSLYLQM |
| | DESMT | ADSVKG | | NSLRAEDTAVYYCAREAPLRLGESPHDAFDISGQGTMVTVSS |
| PD1 | SEQ ID | SEQ ID NO: | SEQ ID NO: 1668 | SEQ ID NO: 1669 |
| blocker | NO: | 1667 | EAPLRLGESPHDA | EVQLVESGGGLVKPGGSLRLSCAASGFTFSDASMTWMRQAP |
| 1.93 | 1666 | YISSGGGVKFY | FDI | GKGLEWVSYISSGGGVKFYADSVKGRFTISRDNAKNSLYLQM |
| | DASMT | ADSVKG | | NSLRAEDTAVYYCAREAPLRLGESPHDAFDISGQGTMVTVSS |
| PD1 | SEQ ID | SEQ ID NO: | SEQ ID NO: 1672 | SEQ ID NO: 1673 |
| blocker | NO: | 1671 | EAPLRLGESPHDA | EVQLVESGGGLVKPGGSLRLSCAASGFTFSDWSMTWMRQAP |
| 1.94 | 1670 | YISSGGGVKFY | FDI | GKGLEWVSYISSGGGVKFYADSVKGRFTISRDNAKNSLYLQM |
| | DWSMT | ADSVKG | | NSLRAEDTAVYYCAREAPLRLGESPHDAFDISGQGTMVTVSS |
| PD1 | SEQ ID | SEQ ID NO: | SEQ ID NO: 1676 | SEQ ID NO: 1677 |
| blocker | NO: | 1675 | EAPLRLGESPHDA | EVQLVESGGGLVKPGGSLRLSCAASGFTFSDGSMTWMRQAP |
| 1.95 | 1674 | YISSGGGVKFY | FDI | GKGLEWVSYISSGGGVKFYADSVKGRFTISRDNAKNSLYLQM |
| | DGSMT | ADSVKG | | NSLRAEDTAVYYCAREAPLRLGESPHDAFDISGQGTMVTVSS |
| PD1 | SEQ ID | SEQ ID NO: | SEQ ID NO: 1680 | SEQ ID NO: 1681 |
| blocker | NO: | 1679 | EAPLRLGESPHDA | EVQLVESGGGLVKPGGSLRLSCAASGFTFSDTSMTWMRQAP |
| 1.96 | 1678 | YISSGGGVKFY | FDI | GKGLEWVSYISSGGGVKFYADSVKGRFTISRDNAKNSLYLQM |
| | DTSMT | ADSVKG | | NSLRAEDTAVYYCAREAPLRLGESPHDAFDISGQGTMVTVSS |
| PD1 | SEQ ID | SEQ ID NO: | SEQ ID NO: 1684 | SEQ ID NO: 1685 |
| blocker | NO: | 1683 | EAPLRLGESPHDA | EVQLVESGGGLVKPGGSLRLSCAASGFTFSDISMTWMRQAPG |
| 1.97 | 1682 | YISSGGGVKFY | FDI | KGLEWVSYISSGGGVKFYADSVKGRFTISRDNAKNSLYLQMNS |
| | DISMT | ADSVKG | | LRAEDTAVYYCAREAPLRLGESPHDAFDISGQGTMVTVSS |
| PD1 | SEQ ID | SEQ ID NO: | SEQ ID NO: 1688 | SEQ ID NO: 1689 |
| blocker | NO: | 1687 | EAPLRLGESPHDA | EVQLVESGGGLVKPGGSLRLSCAASGFTFSDKSMTWMRQAP |
| | 1686 | YISSGGGVKFY | FDI | GKGLEWVSYISSGGGVKFYADSVKGRFTISRDNAKNSLYLQM |
| | DKSMT | ADSVKG | | NSLRAEDTAVYYCAREAPLRLGESPHDAFDISGQGTMVTVSS |
| PD1 | SEQ ID | SEQ ID NO: | SEQ ID NO: 1692 | SEQ ID NO: 1693 |
| blocker | NO: | 1691 | EAPLRLGESPHDA | EVQLVESGGGLVKPGGSLRLSCAASGFTFSDRSMTWMRQAP |
| 1.99 | 1690 | YISSGGGVKFY | FDI | GKGLEWVSYISSGGGVKFYADSVKGRFTISRDNAKNSLYLQM |
| | DRSMT | ADSVKG | | NSLRAEDTAVYYCAREAPLRLGESPHDAFDISGQGTMVTVSS |
| PD1 | SEQ ID | SEQ ID NO: | SEQ ID NO: 1696 | SEQ ID NO: 1697 |
| blocker | NO: | 1695 | EAPLRLGESPHDA | EVQLVESGGGLVKPGGSLRLSCAASGFTFSDLSMTWMRQAP |
| 1.100 | 1694 | YISSGGGVKFY | FDI | GKGLEWVSYISSGGGVKFYADSVKGRFTISRDNAKNSLYLQM |
| | DLSMT | ADSVKG | | NSLRAEDTAVYYCAREAPLRLGESPHDAFDISGQGTMVTVSS |
| PD1 | SEQ ID | SEQ ID NO: | SEQ ID NO: 1700 | SEQ ID NO: 1701 |
| blocker | NO: | 1699 | EAPLRLGESPHDA | EVQLVESGGGLVKPGGSLRLSCAASGFTFSDFSMTWMRQAP |
| 1.101 | 1698 | YISSGGGVKFY | FDI | GKGLEWVSYISSGGGVKFYADSVKGRFTISRDNAKNSLYLQM |
| | DFSMT | ADSVKG | | NSLRAEDTAVYYCAREAPLRLGESPHDAFDISGQGTMVTVSS |
| PD1 | SEQ ID | SEQ ID NO: | SEQ ID NO: 1704 | SEQ ID NO: 1705 |
| blocker | NO: | 1703 | EAPLRLGESPHDA | EVQLVESGGGLVKPGGSLRLSCAASGFTFSDESVTWMRQAPG |
| 1.102 | 1702 | YISSGGGVKFY | FDI | KGLEWVSYISSGGGVKFYTDSVKGRFTISRDNAKNSLYLQMNS |
| | DESVT | TDSVKG | | LRAEDTAVYYCAREAPLRLGESPHDAFDISGQGTMVTVSS |
| PD1 | SEQ ID | SEQ ID NO: | SEQ ID NO: 1708 | SEQ ID NO: 1709 |
| blocker | NO: | 1707 | EAPLRLGESPHDA | EVQLVESGGGLVKPGGSLRLSCAASGFTFSDESQTWMRQAPG |
| 1.103 | 1706 | YISSGGGVKFY | FDI | KGLEWVSYISSGGGVKFYTDSVKGRFTISRDNAKNSLYLQMNS |
| | DESQT | TDSVKG | | LRAEDTAVYYCAREAPLRLGESPHDAFDISGQGTMVTVSS |
| PD1 | SEQ ID | SEQ ID NO: | SEQ ID NO: 1712 | SEQ ID NO: 1713 |
| blocker | NO: | 1711 | EAPLRLGESPHDA | EVQLVESGGGLVKPGGSLRLSCAASGFTFSDESFTWMRQAPG |
| 1.104 | 1710 | YISSGGGVKFY | FDI | KGLEWVSYISSGGGVKFYTDSVKGRFTISRDNAKNSLYLQMNS |
| | DESFT | TDSVKG | | LRAEDTAVYYCAREAPLRLGESPHDAFDISGQGTMVTVSS |
| PD1 | SEQ ID | SEQ ID NO: | SEQ ID NO: 1716 | SEQ ID NO: 1717 |
| blocker | NO: | 1715 | EAPLRLGESPHDA | EVQLVESGGGLVKPGGSLRLSCAASGFTFSDESLTWMRQAPG |
| 1.105 | 1714 | YISSGGGVKFY | FDI | KGLEWVSYISSGGGVKFYTDSVKGRFTISRDNAKNSLYLQMNS |
| | DESLT | TDSVKG | | LRAEDTAVYYCAREAPLRLGESPHDAFDISGQGTMVTVSS |
| PD1 | SEQ ID | SEQ ID NO: | SEQ ID NO: 1720 | SEQ ID NO: 1721 |
| blocker | NO: | 1719 | EAPLRLGESPHDA | EVQLVESGGGLVKPGGSLRLSCAASGFTFSDESKTWMRQAPG |
| 1.106 | 1718 | YISSGGGVKFY | FDI | KGLEWVSYISSGGGVKFYTDSVKGRFTISRDNAKNSLYLQMNS |
| | DESKT | TDSVKG | | LRAEDTAVYYCAREAPLRLGESPHDAFDISGQGTMVTVSS |
| PD1 | SEQ ID | SEQ ID NO: | SEQ ID NO: 1724 | SEQ ID NO: 1725 |
| blocker | NO: | 1723 | EAPLRLGESPHDA | EVQLVESGGGLVKPGGSLRLSCAASGFTFSDESYTWMRQAPG |
| 1.107 | 1722 | YISSGGGVKFY | FDI | KGLEWVSYISSGGGVKFYTDSVKGRFTISRDNAKNSLYLQMNS |
| | DESYT | TDSVKG | | LRAEDTAVYYCAREAPLRLGESPHDAFDISGQGTMVTVSS |
| PD1 | SEQ ID | SEQ ID NO: | SEQ ID NO: 1728 | SEQ ID NO: 1729 |
| blocker | NO: | 1727 | EAPLRLGESPHDA | EVQLVESGGGLVKPGGSLRLSCAASGFTFSDESATWMRQAPG |
| 1.108 | 1726 | YISSGGGVKFY | FDI | KGLEWVSYISSGGGVKFYADSVKGRFTISRDNAKNSLYLQMNS |
| | DESAT | ADSVKG | | LRAEDTAVYYCAREAPLRLGESPHDAFDISGQGTMVTVSS |
| PD1 | SEQ ID | SEQ ID NO: | SEQ ID NO: 1732 | SEQ ID NO: 1733 |
| blocker | NO: | 1731 | EAPLRLGESPHDA | EVQLVESGGGLVKPGGSLRLSCAASGFTFSDESFTWMRQAPG |
| 1.109 | 1730 | YISSGGGVKFY | FDI | KGLEWVSYISSGGGVKFYADSVKGRFTISRDNAKNSLYLQMNS |
| | DESFT | ADSVKG | | LRAEDTAVYYCAREAPLRLGESPHDAFDISGQGTMVTVSS |
| PD1 | SEQ ID | SEQ ID NO: | SEQ ID NO: 1736 | SEQ ID NO: 1737 |
| blocker | NO: | 1735 | EAPLRLGESPHDA | EVQLVESGGGLVKPGGSLRLSCAASGFTFSDESNTWMRQAPG |
| 1.110 | 1734 | YISSGGGVKFY | FDI | KGLEWVSYISSGGGVKFYADSVKGRFTISRDNAKNSLYLQMNS |
| | DESNT | ADSVKG | | LRAEDTAVYYCAREAPLRLGESPHDAFDISGQGTMVTVSS |
| PD1 | SEQ ID | SEQ ID NO: | SEQ ID NO: 1740 | SEQ ID NO: 1741 |
| blocker | NO: | 1739 | EAPLRLGESPHDA | EVQLVESGGGLVKPGGSLRLSCAASGFTFSDESWTWMRQAP |
| 1.111 | 1738 | YISSGGGVKFY | FDI | GKGLEWVSYISSGGGVKFYADSVKGRFTISRDNAKNSLYLQM |
| | DESWT | ADSVKG | | NSLRAEDTAVYYCAREAPLRLGESPHDAFDISGQGTMVTVSS |
| PD1 | SEQ ID | SEQ ID NO: | SEQ ID NO: 1744 | SEQ ID NO: 1745 |
| blocker | NO: | 1743 | EAPLRLGESPHDA | EVQLVESGGGLVKPGGSLRLSCAASGFTFSDESITWMRQAPG |
| 1.112 | 1742 | YISSGGGVKFY | FDI | KGLEWVSYISSGGGVKFYADSVKGRFTISRDNAKNSLYLQMNS |
| | DESIT | ADSVKG | | LRAEDTAVYYCAREAPLRLGESPHDAFDISGQGTMVTVSS |
| PD1 | SEQ ID | SEQ ID NO: | SEQ ID NO: 1748 | SEQ ID NO: 1749 |
| blocker | NO: | 1747 | EAPLRLGESPHDA | EVQLVESGGGLVKPGGSLRLSCAASGFTFSDESSTWMRQAPG |
| 1.113 | 1746 | YISSGGGVKFY | FDI | KGLEWVSYISSGGGVKFYADSVKGRFTISRDNAKNSLYLQMNS |
| | DESST | ADSVKG | | LRAEDTAVYYCAREAPLRLGESPHDAFDISGQGTMVTVSS |
| PD1 | SEQ ID | SEQ ID NO: | SEQ ID NO: 1752 | SEQ ID NO: 1753 |
| blocker | NO: | 1751 | EAPLRLGESPHDA | EVQLVESGGGLVKPGGSLRLSCAASGFTFSDESHTWMRQAPG |
| 1.114 | 1750 | YISSGGGVKFY | FDI | KGLEWVSYISSGGGVKFYADSVKGRFTISRDNAKNSLYLQMNS |
| | DESHT | ADSVKG | | LRAEDTAVYYCAREAPLRLGESPHDAFDISGQGTMVTVSS |
| PD1 | SEQ ID | SEQ ID NO: | SEQ ID NO: 1756 | SEQ ID NO: 1757 |
| blocker | NO: | 1755 | EAPLRLGESPHDA | EVQLVESGGGLVKPGGSLRLSCAASGFTFSDESGTWMRQAPG |
| 1.115 | 1754 | YISSGGGVKFY | FDI | KGLEWVSYISSGGGVKFYADSVKGRFTISRDNAKNSLYLQMNS |
| | DESGT | ADSVKG | | LRAEDTAVYYCAREAPLRLGESPHDAFDISGQGTMVTVSS |

[0249] An exemplary nucleic acid is SEQ ID NO: 1880.

[0250] In one embodiment, the variant V_{H} single domain antibody is selected from any one of the full length sequences shown in the table above with or without one or more amino acid substitutions, for example 1 to 20 for example 1, 2, 3, 4, 5, 6, 7, 8, 9 or 10 amino acid substitutions compared to these sequences. In the below, the numbering refers to sequences for clones in table 11. In one embodiment, the variant V_{H} single domain antibody is selected from Blocker 1.1. In one embodiment, the variant V_{H} single domain antibody is selected from Blocker 1.57,1.64, or 1.92. In one embodiment, the variant V_{H} single domain antibody comprises the sequence as shown for Blocker 1.1 but with amino acid substitutions at one or more the following positions: Y32, T33, T53, T56, I57, K58, Y59, T61 and/or W115.

[0251] In one embodiment, the V_{H} single domain antibody comprises the sequence as shown for Blocker 1.1, but with the following amino acid substitutions: Y32→N, T33→S, T53→S, T56→G, I57→V, K58→I, Y59→F, T61→A, W115→S (Humabody® 1.57)

[0252] In one embodiment, the variant V_{H} single domain antibody comprises the sequence as shown for Blocker 1.57) but with amino acid substitutions at one or more or all of the following positions: D31, N32, I58, A61, T35, S30, G56, S25Q117, M120 and/or Q1.

[0253] In one embodiment, the variant V_{H} single domain antibody comprises the sequence as shown for Blocker 1.57) but with amino acid substitutions selected from one of the following
[0254] 1) D31→G, N32→S (Blocker 1.67);
[0255] 2) S30→G, D31→G, N32→S, I58→K, A61→T (Blocker 1.71);
[0256] 3) T35→S (1.69);
[0257] 4) S30→G, N32→S, G56→A, I58→K, A61→T (Blocker 1.70);
[0258] 5) S25→T, N32→S, S53→A, I58→R, A61→T (Blocker 1.73);
[0259] 6) N32→S, I58→K, A61→T, N84→D, I114→T (Blocker 1.66);
[0260] 7) S30→G, Q117→R, M120→T (Blocker 1.68);
[0261] 8) N32→S, T35→S (Blocker 1.72);
[0262] 9) N32→S, G56→A, I58→K, A61→T (Blocker 1.62);
[0263] 10) N32→S, I58→K (Blocker 1.65);
[0264] 11) Q1→E, N32→S, I58→K (Blocker 1.64);
[0265] 12) Q1→E, N32→S, I58→K, A61→T (Blocker 1.63).

[0266] In one embodiment, the variant V_{H} single domain antibody comprises the sequence as shown for Blocker 1.64) but with amino acid substitutions at one or more or all of the following positions: S32, D90 and/or A61.

[0267] In one embodiment, the variant V_{H} single domain antibody comprises the sequence as shown for Blocker 1.64) but with amino acid substitutions selected from one of the following

### 1. S32→E, D90→E (Blocker 1.92)

### 2. S32→R, D90→E (Blocker 1.99)

### 3. S32→Y, D90→E (Blocker 1.89)

### 4. S32→E, D90→E, A61→T (Blocker 1.84)

### 5. D85→E A60→T (Blocker 1.77)

### 6. S32→T, D90→E, A60→T (Blocker 1.82)

[0268] The numbering used above is based on the actual position of the residue.

Exemplary Binding Molecules that Bind Both CD137 and PD-1

[0269] Any combination of the aforesaid single variable heavy chain domain antibodies that bind to CD137 and PD-1 respectively can be used in a binding agent for dual engagement of CD137 and PD-1 expressing cells. Thus, in one embodiment, any of the single variable heavy chain domain antibodies disclosed above, for example as listed in any of Tables 2, 3, 4 or 7 can be combined in a fusion protein with any of the single variable heavy chain domain antibodies as listed in any of Tables 8, 9, 10 or 11.

[0270] In one embodiment, a single variable heavy chain domain antibody having a set of CDR1, CDR2, CDR3 or a full length sequence as shown Table 2 or a sequence with at least 75%, 80%, 90% or 95% sequence homology thereto can be combined in a fusion protein with a single variable heavy chain domain antibody as shown in Table 8 having a set of CDR1, CDR2, CDR3 or a full length sequence or a sequence with at least 75%, 80%, 90% or 95% sequence homology thereto.

[0271] In one embodiment, a single variable heavy chain domain antibody having a set of CDR1, CDR2, CDR3 or a full length sequence as shown Table 2, 3, 4 or 7 or a sequence with at least 75%, 80%, 90% or 95% sequence homology thereto can be combined in a fusion protein with a single variable heavy chain domain antibody as shown in Table 8, 9 or 10 having a set of CDR1, CDR2, CDR3 or a full length sequence or a sequence with at least 75%, 80%, 90% or 95% sequence homology thereto.

[0272] In one embodiment, a single variable heavy chain domain antibody having a set of CDR1, CDR2, CDR3 or a full length sequence as shown Table 2, 3, 4 or 7 or a sequence with at least 75%, 80%, 90% or 95% sequence homology thereto can be combined in a fusion protein with a single variable heavy chain domain antibody as shown in Table 11 having a set of CDR1, CDR2, CDR3 or a full length sequence or a sequence with at least 75%, 80%, 90% or 95% sequence homology thereto.

[0273] In one embodiment, the multispecific molecule that binds both CD137 and PD-1 may comprise or consist of PDA and CD137A, CD137B, CD137C or CD137D. For example, the molecule comprises or consists of PDA and CD137A or CD137D. PDA may be located C or N terminal of the CD137 binder. PDA and CD137A, CD137B, CD137C or CD137D respectively are linked using a linker, e.g. a peptide linker, e.g. a (G4S)n linker wherein n is 1, 2, 3, 4, 5, or 6. In one embodiment, the linker is (G4S)n=6.

[0274] In another embodiment, the multispecific molecule may comprise or consist of PDA2 and CD137A, CD137B, CD137C or CD137D. For example, the construct comprises PDA2 and CD137A or CD137D. PDA2 may be located C or N terminal of the CD137 binder. PDA2 and CD137A, CD137B, CD137C or CD137D respectively are linked using a linker, e.g. a peptide linker, e.g. a (G4S)n linker wherein n is 1, 2, 3, 4, 5, or 6.

[0275] In one embodiment, the linker is (G4S)n=6. In another embodiment, the multispecific molecule may comprise or consist of PD138G7(G109D) and CD137A, CD137B, CD137C or CD137D. For example, the construct comprises PD138G7(G109D) and CD137A or CD137D. PD138G7(G109D) may be located C or N terminal of the CD137 binder. PD138G7(G109D) and CD137A, CD137B, CD137C or CD137D respectively are linked using a linker, e.g. a peptide linker, e.g. a (G4S)n linker wherein n is 1, 2, 3, 4, 5, or 6. In one embodiment, the linker is (G4S)n=6. In these constructs, an HSA binder. E.g. HSA1, HSA2 or HSA3 as disclosed herein may be included. This can be located at the N terminus, at the C terminus or in the centre; i.e. between the CD137 and PD-1 binder. In one embodiment, the multispecific molecule has SEQ ID NO: 1862.

[0276] In another embodiment, the multispecific molecule may comprise or consist of PDBlocker 1.92 as and CD137A, CD137B, CD137C or CD137D. For example, the construct comprises PDBlocker 1.92 and CD137A or CD137D. PD138G7(G109D) may be located C or N terminal of the CD137 binder. PDBlocker 1.92 and CD137A, CD137B, CD137C or CD137D respectively are linked using a linker, e.g. a peptide linker, e.g. a (G4S)n linker wherein n is 1, 2, 3, 4, 5, or 6. In one embodiment, the linker is (G4S)n=6.

[0277] In these constructs above, an HSA binder. e.g. HSA1, HSA2 or HSA3 as described herein or variants thereof may be included. This can be located at the N terminus, at the C terminus or in the centre using a linker, e.g. a peptide linker, e.g. a (G4S)n linker wherein n is 1, 2, 3, 4, 5, or 6. In one embodiment, the linker is (G4S)n=6.

[0278] For example, provided are multispecific protein or nucleic acid molecules that bind PD-1 and CD37 having a sequence as specified in table 12 or a sequence with at least 80%, 90%, 95% sequence homology thereto. For example, the sequence may have up to 5, 10, 15 or 20 amino acid substitutions, for example outside the CDR regions. These include single domain antibodies that bind to HSA. Also included in the invention are molecules that comprise the PD-1 and CD137 binders but without the HSA binding moiety as shown below. Some molecules shown below include a His tag linked to the C terminal VTVSS of the molecule. Also provided are the molecules as shown below but without the AAA linked His tag. Further envisaged are such molecules with a C terminal extension as described herein. In one embodiment, the molecule is selected from TPP-969, TPP-972, TPP-973, TPP-1010, TPP-1027, TPP1246 and TPP-1028 as shown below, but without the AAA linked His tag being present at the C terminus.

[0279] The two single domain antibodies can be linked with a peptide linker resulting in a fusion protein. The linker can be a (G4S)n linker; (G4S)n=6, as described herein. In one embodiment, the invention provides a fusion protein as shown in table 12 (with or without C terminal tag) or a fusion protein with 80%, 80%, 90% or 95% sequence homology thereto and nucleic acids encoding such fusion protein.

TABLE 12
TPP-942: PDA-6GS-172E1-13-6GS-HSA2-2-His; SEQ ID NO: 1758 Protein
TPP-942; PDA-6GS-172E1-13-6GS-HSA2-His; SEQ ID NO: 1759 Nucleotide
TPP-943: PDA-6GS-172E1-13-6GS-HSA2-His; SEQ ID NO: 1760 Protein
TPP-943: PDA-6GS-172E1-13-6GS-HSA3-His; SEQ ID NO: 1761 Nucleotide
TPP-950: PDA2-6GS-172E1-13-6GS-HSA2-His; SEQ ID NO: 1762 Protein
TPP-950: PDA2-6GS-172E1-13-6GS-HSA2-His; SEQ ID NO: 1763 Nucleotide
TPP-951: PDA2-6GS-172E1-13-6GS-HSA3-His; SEQ ID NO: 1764 Protein
TPP-951: PDA2-6GS-172E1-13-6GS-HSA3-His; SEQ ID NO: 1765 Nucleotide
TPP-957; PD138G7(G109D)-6GS-172E1-13-6GS-HSA2-His; SEQ ID NO: 1766 Protein
TPP-957: PD138G7(G109D)-6GS-172E1-13-6GS-HSA2-His; SEQ ID NO: 1767 Nucleotide
TPP-958: PD138G7(G109D)-6GS-172E1-13-6GS-HSA3-His; SEQ ID NO: 1768 Protein
TPP-958: PD138G7(G109D)-6GS-172E1-13-6GS-HSA3-His; SEQ ID NO: 1769 Nucleotide
TPP-969: PDA-6GS-HSA2-6GS-172E1-13-His; SEQ ID NO: 1770 Protein
TPP-969: PDA-6GS-HSA2-6GS-172E1-13-His; SEQ ID NO: 1771 Nucleotide
TPP-971: PDA2-6GS-HSA2-6GS-172E1-13-His; SEQ ID NO: 1772 Protein
TPP-971: PDA2-6GS-HSA2-6GS-172E1-13-His; SEQ ID NO: 1773 Nucleotide
TPP-972: CD137A-6GS-PDA-6GS-HSA2-His; SEQ ID NO: 1774 Protein
TPP-972: CD137A -6GS-PDA-6GS-HSA22-His; SEQ ID NO: 1775 Nucleotide
TPP-973: CD137A -6GS-PDA2-6GS-HSA2-His; SEQ ID NO: 1776 Protein
TPP-973: CD137A -6GS-PDA2-6GS-HSA2-His; SEQ ID NO: 1777 Nucleotide
TPP-975: CD137D-6GS-PDA2-6GS-HSA2-His; SEQ ID NO: 1778 Protein
TPP-975: CD137D -6GS-PDA2-6GS-HSA2-His; SEQ ID NO: 1779 Nucleotide
TPP-982: CD137A -6GS-HSA2-6GS-PDA-His. SEQ ID NO: 1780 Protein
TPP-982: CD137A -6GS-HSA2-6GS-PDA-His; SEQ ID NO: 1781 Nucleotide
TPP-983: CD137A -6GS-HSA2-6GS-PDA2-His; SEQ ID NO: 1782 Protein
TPP-983: CD137A -6GS-HSA2-6GS-PDA2-His; SEQ ID NO: 1783 Nucleotide
TPP-984: CD137D -6GS-HSA2-6GS-PDA-His; SEQ ID NO: 1784 Protein
TPP-984: CD137D -6GS-HSA2-2-6GS-PDA-His; SEQ ID NO: 1785 Nucleotide
TPP-985: CD137D -6GS-HSA2-2-6GS-PDA2-His; SEQ ID NO: 1786 Protein
TPP-985: CD137D -6GS-HSA2-6GS-PDA2-His; SEQ ID NO: 1787 Nucleotide
TPP-1008: PDA-6GS-HSA3-6GS- CD137D -His; SEQ ID NO: 1788 Protein
TPP-1008: PDA-6GS-HSA3-6GS- CD137D -His; SEQ ID NO: 1789 Nucleotide
TPP-1009: PDA-6GS-hsa1-6GS- CD137D -His; SEQ ID NO: 1790 Protein
TPP-1009: PDA-6GS-hsa1-6GS- CD137D -His; SEQ ID NO: 1791 Nucleotide
TPP-1010: PD138G7(G109D)-6GS-HSA2-6GS- CD137D -His; SEQ ID NO: 1792 Protein
TPP-1010: PD138G7(G109D)-6GS-HSA2-6GS- CD137D -His; SEQ ID NO: 1793 Nucleotide
SEQ ID NO: TPP-1011: PD138G7(G109D)-6GS-HSA3-6GS-CD137D-His; SEQ ID NO: 1794 Protein
TPP-1011: PD138G7(G109D)-6GS-HSA3-6GS- CD137D -His; SEQ ID NO: 1795 Nucleotide
TPP-1012PD138G7(G109D)-6GS-HSA1-6GS- CD137D -His; SEQ ID NO: 1796 Protein
TPP-1012PD138G7(G109D)-6GS-HSA1-6GS- CD137D -His; SEQ ID NO: 1797 Nucleotide
TPP-1014: CD137A -6GS-PDA-6GS-HSA-His; SEQ ID NO: 1798 Protein
TPP-1014: CD137A -6GS-PDA-6GS-HSA1-His; SEQ ID NO: 1799 Nucleotide
TPP-1015: CD137A -6GS-PDA2-6GS-HSA3-His, SEQ ID NO: 1800Protein
TPP-1015: CD137A -6GS-PDA2-6GS-HSA3-His. SEQ ID NO: 1801Nucleotide
TPP-1016: CD137A -6GS-PDA2-6GS-HSA1-His; SEQ ID NO: 1802 Protein
TPP-1016: CD137A -6GS-PDA2-6GS-HSA1-His; SEQ ID NO: 1803 Nucleotide
TPP-1017: CD137A -6GS-PD138G7(G109D)-6GS-HSA2-His; SEQ ID NO: 1804 Protein
TPP-1017: CD137A -6GS-PD138G7(G109D)-6GS-HSA2-His; SEQ ID NO: 1805 Nucleotide
TPP-1018: CD137A -6GS-PD138G7(G109D)-6GS-HSA3-His; SEQ ID NO: 1806 Protein
TPP-1018: CD137A -6GS-PD138G7(G109D)-6GS-HSA3-His; SEQ ID NO: 1807 Nucleotide
TPP-1023: CD137A -6GS-HSA3-6GS-PDA-His; SEQ ID NO: 1808 Protein
TPP-1023: CD137A -6GS-HSA3-6GS-PDA-His; SEQ ID NO: 1809 Nucleotide
TPP-1025: CD137A -6GS-HSA3-2-6GS-PDA2-His; SEQ ID NO: 1810 Protein
TPP-1025: CD137A -6GS-HSA3-6GS-PDA2-His; SEQ ID NO: 1811 Nucleotide
TPP-1027: CD137A -6GS-HSA2-6GS-PD138G7(G109D)-His; SEQ ID NO: 1812 Protein
TPP-1027: CD137A -6GS-HSA2-6GS-PD138G7(G109D)-His; SEQ ID NO: 1813 Nucleotide
TPP-1028: CD137A -6GS-HSA3-6GS-PD138G7(G109D)-His; SEQ ID NO: 1814 Protein
TPP-1028: CD137A -6GS-HSA3-6GS-PD138G7(G109D)-His; SEQ ID NO: 1815 Nucleotide
TPP-1052: PDA2-6GS-HSA3-6GS- CD137D- His; SEQ ID NO: 1816 Protein
TPP-1052: PDA2-6GS-HSA3-6GS- CD137D -His; SEQ ID NO: 1817 Nucleotide
TPP-1294 (PDBlocker1.92-6GS- CD137A -7-6GS-HSA1943) SEQ ID NO: 1818 Protein
TPP-1293 (PDBlocker1.92-6GS- CD137A -6GS-HSA2) SEQ ID NO: 1819 Nucleic acid
TPP-1439 PD138G7(G109D)-6GS-PD138G7(G109D)-6GS-CD137A-7-6GS-HSA2
SEQ ID NO: 1852 Protein
SEQ ID NO: 1882 Nucleic acid
TPP-1438 CD137A-6GS-HSA2-6GS-PD138G7(G109D)-6GS-PD138G7(G109D)
SEQ ID NO: 1853 Protein
SEQ ID NO: 1883 Nucleic acid
TPP-1411 PD138G7(G109D)-1GS-CD137A-1GS-HSA2
SEQ ID NO: 1854 Protein
SEQ ID NO: 1884 Nucleic acid
TPP-1410 PD138G7(G109D)-1GS-CD137A-6GS-HSA2
SEQ ID NO: 1855 Protein
SEQ ID NO: 1885 Nucleic acid
TPP-1409 CD137A-1GS-HSA2-1GS-PD138G7(G109D)
SEQ ID NO: 1856 Protein
SEQ ID NO: 1886 Nucleic acid
TPP-1408 PD138G7(G109D)-1GS-HSA2-1GS-CD137D
SEQ ID NO: 1857 Protein
SEQ ID NO: 1887 Nucleic acid
TPP-1294 PDBlocker1.92-6GS-CD137A-7-6GS-HSA3
SEQ ID NO: 1858 Protein
SEQ ID NO: 1888 Nucleic acid
TPP-1291 PD138G7(G109D)-6GS-CD137A-6GS-HSA1943
SEQ ID NO: 1859 Protein
SEQ ID NO: 1889 Nucleic acid
TPP-1290 PD138G7(G109D)-6GS-CD137A-6GS-HSA2
SEQ ID NO: 1860 Protein
SEQ ID NO: 1890 Nucleic acid
TPP-1247 CD137A-6GS-HSA3-6GS-PD138G7(G109D)
SEQ ID NO: 1861 Protein
SEQ ID NO: 1891 Nucleic acid
TPP-1246 CD137A-6GS-HSA2-6GS-PD138G7(G109D)
SEQ ID NO: 1862 Protein
SEQ ID NO: 1892 Nucleic acid
TPP-1245 CD137A-6GS-PDA2-6GS-HSA2
SEQ ID NO: 1863 Protein
SEQ ID NO: 1893 Nucleic acid
TPP-1242 PD138G7(G109D)-6GS-HSA2-6GS-CD137D
SEQ ID NO: 1864 Protein
SEQ ID NO: 1894 Nucleic acid
TPP-1241 PDA-6GS-HSA2-6GS-CD137D
SEQ ID NO: 1865 Protein
SEQ ID NO: 1895 Nucleic acid

[0280] TPP-1293, TPP-1294 both include PD-1 binders that block PD-1 function when used on its own (i.e. not in format with a CD13 binder). The other constructs in the table include PD-1 binders that do not block PD-1 binding to PD-L1.

### Exemplary Modifications of the Binding Molecule

[0281] In one embodiment, a binding agent described above comprises further binding molecules. Thus, the binding agent can, for example, be trispecific or tetraspecific.

[0282] In one embodiment, the binding molecule comprises a first V_{H} single domain antibody that binds to CD137 (V_{H} (A)) and a second moiety, for example a V_{H} single domain antibody, that binds to PD-1 (V_{H} (B)). It further comprises a third, fourth, fifth etc moiety, for example a V_{H} single domain antibody (i.e. V_{H} (C), V_{H} (D), V_{H} (E)) that binds to another antigen. Thus, in one embodiment, the binding molecule has the following formula (wherein V_{H} stands for a single domain antibody as defined herein, that is the single V_{H} domain that does not comprise other parts of a full antibody and retains binding to the antigen): V_{H} (A)-L-V_{H} (B)-L-V_{H} (X)n wherein X denotes a V_{H} binding to a target other than the target V_{H} (A) and V_{H} (B) bind to and wherein X is 1 to 10, for example, 1, 2, 3, 4, 5, 6, 7, 8, 9 or 10. L denotes a linker, for example a peptide linker. As explained elsewhere, a moiety that binds to PD-1 or another target can be selected from an antibody or fragment thereof or other polypeptide.

[0283] In another embodiment, the further moiety may serve to prolong the half-life of the binding molecule. The further moiety may comprise a protein, for example a peptide, antibody, or part thereof, such as a V_{H} or CDR, that binds a serum albumin, e.g., human serum albumin (HSA) or mouse serum albumin (MSA). In one embodiment, the further moiety may comprise a V H domain that binds serum albumin, e.g., human serum albumin (HSA) or mouse serum albumin (MSA). The further moiety may comprise a serum albumin, e.g. a HSA or a variant thereof such as HSA C34S. The HSA binder may a single domain antibody, for example a variable heavy chain single domain antibody. Exemplary antibodies are provided herein as HSA1, HSA2 and HSA3. Further provided is a binding molecule as described herein comprising a V_{H} domain and an Fc domain, e.g., wherein the V_{H} domain is fused to an Fc domain.

[0284] The term “half-life” as used herein refers to the time taken for the serum concentration of the amino acid sequence, compound or polypeptide to be reduced by 50%, in vivo, for example due to degradation of the sequence or compound and/or clearance or sequestration of the sequence or compound by natural mechanisms. Half-life may be increased by at least 1.5 times, preferably at least 2 times, such as at least 5 times, for example at least 10 times or more than 20 times, greater than the half-life of the corresponding V_{H} single domain antibodies of the invention. For example, increased half-life may be more than 1 hours, preferably more than 2 hours, more preferably more than 6 hours, such as more than 12 hours, or even more than 24, 48 or 72 hours, compared to the corresponding V_{H} single domain antibodies or fusion protein of the invention. The in vivo half-life of an amino acid sequence, compound or polypeptide of the invention can be determined in any manner known per se, such as by pharmacokinetic analysis. Suitable techniques will be clear to the person skilled in the art. Half life can for example be expressed using parameters such as the t1/2-alpha t1/2-beta and the area under the curve (AUC).

[0285] In one embodiment, the binding agents are labelled with a detectable or functional label. A label can be any molecule that produces or can be induced to produce a signal, including but not limited to fluorophores, fluorescers, radiolabels, enzymes, chemiluminescers, a nuclear magnetic resonance active label or photosensitizers. Thus, the binding may be detected and/or measured by detecting fluorescence or luminescence, radioactivity, enzyme activity or light absorbance.

[0286] In still other embodiments binding agents are coupled to at least one therapeutic moiety, such as a drug, an enzyme or a toxin. In one embodiment, the therapeutic moiety is a toxin, for example a cytotoxic radionuclide, chemical toxin or protein toxin.

[0287] In another aspect, the binding agents of the invention are modified to increase half-life, for example by a chemical modification, especially by PEGylation, or by incorporation in a liposome or using a serum albumin protein. Increased half life can also be conferred by conjugating the molecule to a n antibody fragment, for example a V_{H} domain that increases half life.

[0288] To generate multivalent binding agents as described above, two binding molecules can be connected by a linker, for example a polypeptide linker. Suitable linkers include for example a linker with GS residues such as (Gly4Ser)n, where n=from 1 to 10 or more, e.g., 1, 2, 3, 4, 5, 6, 7, 8, 9 or 10 and specific sequences of examples are provided elsewhere.

### Exemplary Methods for Making Single Domain Antibody and Binding Molecules

[0289] A single domain antibody described herein for use in the multispecific molecule can be obtained from a transgenic rodent that expresses heavy chain only antibodies upon stimulation with a CD137 or PD-1 antigen respectively. The transgenic rodent, for example a mouse, preferably has a reduced capacity to express endogenous antibody genes. Thus, in one embodiment, the rodent has a reduced capacity to express endogenous light and/or heavy chain antibody genes. The rodent may therefore comprise modifications to disrupt expression of endogenous kappa and lambda light and/or heavy chain antibody genes so that no functional light and/or heavy chains are produced, for example as further explained below.

[0290] A method for producing a human heavy chain only antibody capable of binding the target antigen comprises
[0291] a) immunising a transgenic rodent, e.g. a mouse, with target antigen (i.e. PD-1 or CD137) wherein said rodent expresses a nucleic acid construct comprising unrearranged human heavy chain V genes and is not capable of making functional endogenous light or heavy chains,
[0292] b) isolating human heavy chain only antibodies.

[0293] Further steps can include isolating a V_{H} domain from said heavy chain only antibody, for example by generating a library of sequences comprising V_{H} domain sequences from said rodent, e.g. mouse, and isolating sequences comprising V_{H} domain sequences from said libraries.

[0294] A method for producing a single V_{H} domain antibody capable of binding to the target antigen comprises
[0295] a) immunising a transgenic rodent, e.g. a mouse with a target antigen wherein said rodent, e.g. mouse, expresses a nucleic acid construct comprising unrearranged human heavy chain V genes and is not capable of making functional endogenous light or heavy chains,
[0296] b) generating a library of sequences comprising V_{H} domain sequences from said rodent, e.g. mouse, and
[0297] c) isolating sequences comprising V_{H} domain sequences from said libraries.

[0298] Further steps may include identifying a single V_{H} domain antibody or heavy chain only antibody that binds to the target antigen, for example by using functional assays as shown in the examples.

[0299] Methods for preparing or generating the polypeptides, nucleic acids, host cells, products and compositions described herein using in vitro expression libraries can comprise the steps of:

a) providing a set, collection or library of nucleic acid sequences encoding amino acid sequences; and
b) screening said set, collection or library for amino acid sequences that can bind to/have affinity for the target antigen and
c) isolating the amino acid sequence(s) that can bind to/have affinity for target antigen.

[0300] In the above method, the set, collection or library of amino acid sequences may be displayed on a phage, phagemid, ribosome or suitable micro-organism (such as yeast), such as to facilitate screening. Suitable methods, techniques and host organisms for displaying and screening (a set, collection or library of) amino acid sequences will be clear to the person skilled in the art (see for example Phage Display of Peptides and Proteins: A Laboratory Manual, Academic Press; 1st edition (Oct. 28, 1996) Brian K. Kay, Jill Winter, John McCafferty).

[0301] Libraries, for example phage libraries, are generated by isolating a cell or tissue expressing an antigen-specific, heavy chain-only antibody, cloning the sequence encoding the V_{H} domain(s) from mRNA derived from the isolated cell or tissue and displaying the encoded protein using a library. The V_{H} domain(s) can be expressed in bacterial, yeast or other expression systems.

[0302] In the various aspects and embodiments as out herein, the term rodent may relate to a mouse or a rat. In one embodiment, the rodent is a mouse. The mouse may comprise a non-functional endogenous lambda light chain locus. Thus, the mouse does not make a functional endogenous lambda light chain. In one embodiment, the lambda light chain locus is deleted in part or completely or rendered non-functional through insertion, inversion, a recombination event, gene editing or gene silencing. For example, at least the constant region genes C1, C2 and C3 may be deleted or rendered non-functional through insertion or other modification as described above. In one embodiment, the locus is functionally silenced so that the mouse does not make a functional lambda light chain.

[0303] Furthermore, the mouse may comprise a non-functional endogenous kappa light chain locus. Thus, the mouse does not make a functional endogenous kappa light chain. In one embodiment, the kappa light chain locus is deleted in part or completely or rendered non-functional through insertion, inversion, a recombination event, gene editing or gene silencing. In one embodiment, the locus is functionally silenced so that the mouse does not make a functional kappa light chain.

[0304] The mouse having functionally-silenced endogenous lambda and kappa L-chain loci may, for example, be made as disclosed in WO 2003/000737, which is hereby incorporated by reference in its entirety.

[0305] Furthermore, the mouse may comprise a non-functional endogenous heavy chain locus. Thus, the mouse does not make a functional endogenous heavy chain. In one embodiment, the heavy chain locus is deleted in part or completely or rendered non-functional through insertion, inversion, a recombination event, gene editing or gene silencing. In one embodiment, the locus is functionally silenced so that the mouse does not make a functional heavy chain. This can be as described in WO 2004/076618 (hereby incorporated by reference in its entirety).

[0306] By deletion in part is meant that the endogenous locus gene sequence has been deleted or disrupted, for example by an insertion, to the extent that no functional endogenous gene product is encoded by the locus, i.e., that no functional product is expressed from the locus. In another embodiment, the locus is functionally silenced.

[0307] In one embodiment, the mouse comprises a non-functional endogenous heavy chain locus, a non-functional endogenous lambda light chain locus and a non-functional endogenous kappa light chain locus. The mouse therefore does not produce any functional endogenous light or heavy chains. Thus, the mouse is a triple knockout (TKO) mouse. The transgenic mouse may comprise a vector, for example a Yeast Artificial Chromosome (YAC) for expressing a heterologous, preferably a human, heavy chain locus. For example, the YAC may comprise a plethora of unrearranaged human V_{H}, D and J genes in combination with mouse immunoglobulin constant region genes lacking C_{H}1 domains, mouse enhancer and regulatory regions. The human V_{H}, D and J genes are human V_{H}, D and J loci and they are unrearranged genes that are fully human.

[0308] Alternative methods known in the art may be used for deletion or inactivation of endogenous mouse or rat immunoglobulin genes and introduction of human V_{H}, D and J genes in combination with mouse immunoglobulin constant region genes lacking C_{H}1 domains, mouse enhancer and regulatory regions.

[0309] Transgenic mice can be created according to standard techniques as illustrated in the examples. Triple knock-out mice into which transgenes have been introduced to express immunoglobulin loci are referred to herein as TKO/Tg. In one embodiment, the mouse is as described in WO2016/062990.

[0310] Fusion proteins as described herein can be generated by linking a nucleic acid encoding a single variable heavy chain domain antibody that binds to CD137 to a nucleic acid encoding a single variable heavy chain domain antibody that binds to PD-1, for example using a nucleic acid sequence that encodes a peptide linker. Such fusion nucleic acid molecules are then expressed in suitable host cells.

### Exemplary Therapeutic Applications of the Binding Molecules

[0311] In another aspect, there is provided a pharmaceutical composition comprising a binding molecule as described herein and optionally a pharmaceutically acceptable carrier. A binding molecule as described herein or the pharmaceutical composition of the invention can be administered by any convenient route, including but not limited to oral, topical, parenteral, sublingual, rectal, vaginal, ocular, intranasal, pulmonary, intradermal, intravitreal, intramuscular, intraperitoneal, intravenous, subcutaneous, intracerebral, transdermal, transmucosal, by inhalation, or topical, particularly to the ears, nose, eyes, or skin or by inhalation.

[0312] Parenteral administration includes, for example, intravenous, intramuscular, intraarterial, intraperitoneal, intranasal, rectal, intravesical, intradermal, topical or subcutaneous administration. Preferably, the compositions are administered parenterally.

[0313] The pharmaceutically acceptable carrier or vehicle can be particulate, so that the compositions are, for example, in tablet or powder form. The term “carrier” refers to a diluent, adjuvant or excipient, with which a drug antibody of the present invention is administered. Such pharmaceutical carriers can be liquids, such as water and oils, including those of petroleum, animal, vegetable or synthetic origin, such as peanut oil, soybean oil, mineral oil, sesame oil and the like. The carriers can be saline, gum acacia, gelatin, starch paste, talc, keratin, colloidal silica, urea, and the like. In addition, auxiliary, stabilizing, thickening, lubricating and coloring agents can be used. In one embodiment, when administered to an animal, the single domain antibody of the present invention or compositions and pharmaceutically acceptable carriers are sterile. Water is a preferred carrier when the binding molecule of the present invention is administered intravenously. Saline solutions and aqueous dextrose and glycerol solutions can also be employed as liquid carriers, particularly for injectable solutions. Suitable pharmaceutical carriers also include excipients such as starch, glucose, lactose, sucrose, gelatin, malt, rice, flour, chalk, silica gel, sodium stearate, glycerol monostearate, talc, sodium chloride, dried skim milk, glycerol, propylene, glycol, water, ethanol and the like. The present compositions, if desired, can also contain minor amounts of wetting or emulsifying agents, or pH buffering agents.

[0314] The pharmaceutical composition of the invention can be in the form of a liquid, e.g., a solution, emulsion or suspension. The liquid can be useful for delivery by injection, infusion (e.g., IV infusion) or sub-cutaneously.

[0315] When intended for oral administration, the composition is preferably in solid or liquid form, where semi-solid, semi-liquid, suspension and gel forms are included within the forms considered herein as either solid or liquid.

[0316] As a solid composition for oral administration, the composition can be formulated into a powder, granule, compressed tablet, pill, capsule, chewing gum, wafer or the like form. Such a solid composition typically contains one or more inert diluents. In addition, one or more of the following can be present: binders such as carboxymethylcellulose, ethyl cellulose, microcrystalline cellulose, or gelatin; excipients such as starch, lactose or dextrins, disintegrating agents such as alginic acid, sodium alginate, corn starch and the like; lubricants such as magnesium stearate; glidants such as colloidal silicon dioxide; sweetening agents such as sucrose or saccharin; a flavoring agent such as peppermint, methyl salicylate or orange flavoring; and a coloring agent. When the composition is in the form of a capsule (e. g. a gelatin capsule), it can contain, in addition to materials of the above type, a liquid carrier such as polyethylene glycol, cyclodextrin or a fatty oil.

[0317] The composition can be in the form of a liquid, e. g. an elixir, syrup, solution, emulsion or suspension. The liquid can be useful for oral administration or for delivery by injection. When intended for oral administration, a composition can comprise one or more of a sweetening agent, preservatives, dye/colorant and flavor enhancer. In a composition for administration by injection, one or more of a surfactant, preservative, wetting agent, dispersing agent, suspending agent, buffer, stabilizer and isotonic agent can also be included.

[0318] Compositions can take the form of one or more dosage units.

[0319] In specific embodiments, it can be desirable to administer the composition locally to the area in need of treatment, or by intravenous injection or infusion.

[0320] The amount of the therapeutic that is effective/active in the treatment of a particular disorder or condition will depend on the nature of the disorder or condition, and can be determined by standard clinical techniques. In addition, in vitro or in vivo assays can optionally be employed to help identify optimal dosage ranges. The precise dose to be employed in the compositions will also depend on the route of administration, and the seriousness of the disease or disorder, and should be decided according to the judgment of the practitioner and each patient's circumstances. Factors like age, body weight, sex, diet, time of administration, rate of excretion, condition of the host, drug combinations, reaction sensitivities and severity of the disease shall be taken into account.

[0321] Typically, the amount is at least about 0.01% of a single domain antibody of the present invention by weight of the composition. When intended for oral administration, this amount can be varied to range from about 0.1% to about 80% by weight of the composition. Preferred oral compositions can comprise from about 4% to about 50% of the single domain antibody of the present invention by weight of the composition.

[0322] Preferred compositions of the present invention are prepared so that a parenteral dosage unit contains from about 0.01% to about 2% by weight of the single domain antibody of the present invention. The invention also relates to a device, such as a pre-filled syringe which comprises a binding molecule of the invention.

[0323] For administration by injection, the composition can comprise from about typically about 0.1 mg/kg to about 250 mg/kg of the subject's body weight, preferably, between about 0.1 mg/kg and about 20 mg/kg of the subject's body weight, and more preferably about 1 mg/kg to about 10 mg/kg of the subject's body weight. In one embodiment, the composition is administered at a dose of about 1 to 30 mg/kg, e.g., about 5 to 25 mg/kg, about 10 to 20 mg/kg, about 1 to 5 mg/kg, or about 3 mg/kg. The dosing schedule can vary from e.g., once a week to once every 2, 3, or 4 weeks.

[0324] As used herein, “treat”, “treating” or “treatment” means inhibiting or relieving a disease or disorder. For example, treatment can include a postponement of development of the symptoms associated with a disease or disorder, and/or a reduction in the severity of such symptoms that will, or are expected, to develop with said disease. The terms include ameliorating existing symptoms, preventing additional symptoms, and ameliorating or preventing the underlying causes of such symptoms. Thus, the terms denote that a beneficial result is being conferred on at least some of the mammals, e.g., human patients, being treated. Many medical treatments are effective for some, but not all, patients that undergo the treatment.

[0325] The term “subject” or “patient” refers to an animal which is the object of treatment, observation, or experiment. By way of example only, a subject includes, but is not limited to, a mammal, including, but not limited to, a human or a non-human mammal, such as a non-human primate, murine, bovine, equine, canine, ovine, or feline.

[0326] As used herein, the term “effective amount” means an amount of the binding molecule as described herein, that when administered alone or in combination with an additional therapeutic agent to a cell, tissue, or subject, is effective to achieve the desired therapeutic or prophylactic effect under the conditions of administration.

[0327] The invention furthermore relates to a method for the prevention and/or treatment of cancer, comprising administering a binding molecule of the invention to a subject, said method comprising administering, to a subject in need thereof, a pharmaceutically active amount of a binding molecule and/or of a pharmaceutical composition of the invention. In particular, the invention relates to a method for the prevention and/or treatment of cancer, said method comprising administering, to a subject in need thereof, a pharmaceutically active amount of a binding molecule or a pharmaceutical composition of the invention.

[0328] The invention also relates to a binding molecule of the invention for use in the treatment of a disease, such as cancer, an immune disorder, neurological disease, inflammatory disorder, allergy, transplant rejection, viral infection, (e.g. chronic viral infection) immune deficiency, and other immune system-related disorder. In one embodiment, the disease is cancer. The cancer can be selected from a solid or non-solid tumor. For example, the cancer may be selected from bone cancer, pancreatic cancer, skin cancer, cancer of the head or neck, cutaneous or intraocular malignant melanoma, uterine cancer, ovarian cancer, rectal cancer, cancer of the anal region, stomach cancer, testicular cancer, breast cancer, brain cancer, carcinoma of the fallopian tubes, carcinoma of the endometrium, carcinoma of the cervix, carcinoma of the vagina, carcinoma of the vulva, cancer of the esophagus, cancer of the small intestine, cancer of the endocrine system, cancer of the thyroid gland, cancer of the parathyroid gland, cancer of the adrenal gland, kidney cancer, sarcoma of soft tissue, cancer of the urethra, cancer of the bladder, renal cancer, lung cancer, non-small cell lung cancer, thymoma, urothelial carcinoma leukemia, prostate cancer, mesothelioma, adrenocortical carcinoma, lymphomas, such as such as Hodgkin's disease, non-Hodgkin's, gastric cancer, and multiple myelomas.

[0329] In one embodiment, the tumor is a solid tumor. Examples of solid tumors which may be accordingly treated include breast carcinoma, lung carcinoma, colorectal carcinoma, pancreatic carcinoma, glioma and lymphoma. Some examples of such tumors include epidermoid tumors, squamous tumors, such as head and neck tumors, colorectal tumors, prostate tumors, breast tumors, lung tumors, including small cell and non-small cell lung tumors, pancreatic tumors, thyroid tumors, ovarian tumors, and liver tumors. Other examples include Kaposi's sarcoma, CNS, neoplasms, neuroblastomas, capillary hemangioblastomas, meningiomas and cerebral metastases, melanoma, gastrointestinal and renal carcinomas and sarcomas, rhabdomyosarcoma, glioblastoma, preferably glioblastoma multiforme, and leiomyosarcoma. Examples of vascularized skin cancers for which the antagonists of this invention are effective include squamous cell carcinoma, basal cell carcinoma and skin cancers that can be treated by suppressing the growth of malignant keratinocytes, such as human malignant keratinocytes.

[0330] In one embodiment, the tumor is a non-solid tumor. Examples of non-solid tumors include leukemia, multiple myeloma and lymphoma.

[0331] In one aspect, the cancer is identified as a PD-L1 positive cancer. In one aspect, the cancer is locally advanced unresectable, metastatic, or recurrent cancer.

[0332] Preferred cancers whose growth may be inhibited using the antibodies of the invention include cancers typically responsive to immunotherapy. Non-limiting examples of preferred cancers for treatment include melanoma (e.g., metastatic malignant melanoma), renal cancer (e.g. clear cell carcinoma), prostate cancer (e.g. hormone refractory prostate adenocarcinoma), breast cancer, colon cancer and lung cancer (e.g. non-small cell lung cancer).

[0333] In one embodiment, the cancer has progressed after another treatment, for example chemotherapy.

[0334] The multivalent molecules which include a PD-1 binding moeity that blocks PD-1 signaling and pharmaceutical compositions described herein are particularly useful for the treatment of cancers that are associated with cells (e.g., exhausted T cells, B cells, monocytes, etc.) that express abnormally high levels of PD-1. Other preferred cancers include those characterized by elevated expression of PD-1 and/or its ligands PD-L1 and/or PD-L2. In one embodiment, the cancer is selected from a cancer that has high levels of cancer-associated genetic mutations and/or high levels of expression of tumour antigens. In another embodiment, the cancer is selected from a cancer known to be immunogenic or that is able to become immunogenic upon treatment with other cancer therapies.

[0335] In another aspect, the invention relates to the use of a binding molecule of the invention in the treatment of disease. In another aspect, the invention relates to the use of a binding molecule of the invention in the manufacture of a medicament for the treatment of cancer.

[0336] In one aspect, the cancer is locally advanced unresectable, metastatic, or recurrent cancer.

[0337] The binding molecule of the invention may be administered as the sole active ingredient or in combination with one or more other therapeutic and/or cytotoxic moiety. In one embodiment, the binding molecule may be conjugated to a toxic moiety.

[0338] In one embodiment, the single domain antibody is used in combination with surgery.

Exemplary Combinations with Other Agents

[0339] The molecules or pharmaceutical composition of the invention, including monovalent or multivalent molecules, may be administered as the sole active ingredient or in combination with one or more other therapeutic agent. A therapeutic agent is a compound or molecule which is useful in the treatment of a disease such as cancer, an immune disorder, neurological disease, inflammatory disorder, allergy, transplant rejection, viral infection, (e.g. chronic viral infection) immune deficiency, and other immune system-related disorder.

[0340] In one embodiment, the disease is cancer. Thus, we also provide a combination therapy using a multispecific molecule as described herein together with another PD-1 therapy. The PD-1 therapy may be selected from a PD-1 inhibitor, such as an antibody molecule, such as Pembrolizumab (Keytruda), Nivolumab (Opdivo) or Cemiplimab (Libtayo) or a PD-L1 inhibitor. Alternatively, the PD-1 therapy may be a CAR-T therapy.

[0341] Examples of therapeutic agents include antibodies, antibody fragments, drugs, toxins, nucleases, hormones, immunomodulators, pro-apoptotic agents, anti-angiogenic agents, boron compounds, photoactive agents or dyes and radioisotopes. An antibody molecule includes a full antibody or fragment thereof (e.g., a Fab, F(ab′)2, Fv, a single chain Fv fragment (scFv) or a single domain antibody, for example a V_{H} domain, antibody mimetic protein or a protein that mimics the natural ligand of CD137.

[0342] The anti-cancer therapy may include a therapeutic agent or radiation therapy and includes gene therapy, viral therapy, RNA therapy bone marrow transplantation, nanotherapy, targeted anti-cancer therapies or oncolytic drugs. Examples of other therapeutic agents include other checkpoint inhibitors, antineoplastic agents, immunogenic agents, attenuated cancerous cells, tumor antigens, antigen presenting cells such as dendritic cells pulsed with tumor-derived antigen or nucleic acids, immune stimulating cytokines (e.g., IL-2, IFNa2, GM-CSF), targeted small molecules and biological molecules (such as components of signal transduction pathways, e.g. modulators of tyrosine kinases and inhibitors of receptor tyrosine kinases, and agents that bind to tumor-specific antigens, including EGFR antagonists), an anti-inflammatory agent, a cytotoxic agent, a radiotoxic agent, or an immunosuppressive agent and cells transfected with a gene encoding an immune stimulating cytokine (e.g., GM-CSF), chemotherapy. In one embodiment, administration is in combination with surgery. The binding molecule of the invention may be administered at the same time or at a different time as the other therapy, e.g., simultaneously, separately or sequentially.

### Exemplary Methods for Modulating Immune Response, Inhibiting Tumor Growth Etc

[0343] In yet another aspect, there is provided a method of modulating an immune response in a subject comprising administering to the subject the binding molecule or pharmaceutical composition described herein such that the immune response in the subject is modulated. Preferably, the binding molecule enhances, stimulates or increases the immune response in the subject.

[0344] In a further aspect, there is provided a method of inhibiting growth of tumor cells or promoting tumor regression in a subject, comprising administering to a subject a therapeutically effective amount of a binding molecule or a pharmaceutical composition described herein.

[0345] In a further aspect, there is provided a method for activating the downstream signalling pathway of CD137 comprising administering to a subject a binding molecule or a pharmaceutical composition described herein.

[0346] In a further aspect, there is provided a method for inducing T lymphocyte activation and/or proliferation comprising administering to a subject a binding molecule or a pharmaceutical composition described herein.

[0347] In a further aspect, there is provided a method for dual targeting of a cell expressing both CD137 and PD-1, or for localising the CD137 activation in the region of cells expressing PD-1 or localising the PD-1 pathway blocking in the region of cells expressed CD137 comprising administering to a subject a binding molecule comprising a single variable heavy chain domain antibody that binds to CD137 or a pharmaceutical composition described herein.

[0348] In a further aspect, there is provided a binding molecule comprising a single variable heavy chain domain antibody that binds to CD137 or a pharmaceutical composition described herein for dual targeting of a CD137 expressing cell and PD-1 expressing cell. For example, the binding molecule comprises a single variable heavy chain domain antibody that binds to CD137 described herein and a single variable heavy chain domain antibody that binds to PD-1 as described herein.

[0349] In a further aspect, there is provided a method for down-modulating PD-1 on the cell surface comprising administering to a subject a binding molecule described herein, such as a binding molecule comprising a single variable heavy chain domain antibody that binds to CD137 and comprising a single variable heavy chain domain antibody that binds to PD-1 or a pharmaceutical composition described herein. In one embodiment, the single variable heavy chain domain antibody that binds to PD-1 is a single variable heavy chain domain antibody that does not block PD-1 function when used on its own, that is when not used in a multispecific binding molecule with CD137. This can be selected from one of the molecules as set out in Tables 8, 9 or 10 or a molecule having at least 70%, 80,% 90% or 95% sequence homology thereto.

[0350] In a further aspect, there is provided a method for blocking PD-1 function comprising administering to a subject a binding molecule described herein, such as a binding molecule comprising a single variable heavy chain domain antibody that binds to CD137 and comprising a single variable heavy chain domain antibody that binds to PD-1 or a pharmaceutical composition described herein. In one embodiment, the single variable heavy chain domain antibody that binds to PD-1 is a single variable heavy chain domain antibody that does not block PD-1 function when used on its own, that is when not used in a multispecific binding molecule with CD137. This can be selected from one of the molecules as set out in Tables 8, 9 or 10 or a molecule having at least 70%, 80,% 90% or 95% sequence homology thereto.

[0351] In a further aspect, there is provided a method for simultaneously activating downstream signalling pathways of CD137 and PD-1 and independently leading to CD137 agonism or PD-1 downstream signalling inhibition comprising administering to a subject a binding molecule described herein, such as a binding molecule comprising a single variable heavy chain domain antibody that binds to CD137 and comprising a single variable heavy chain domain antibody that binds to PD-1 or a pharmaceutical composition described herein. In one embodiment, the single variable heavy chain domain antibody that binds to PD-1 is a single variable heavy chain domain antibody that does not block PD-1 function when used on its own, that is when not used in a multispecific binding molecule with CD137. This can be selected from one of the molecules as set out in Tables 8, 9 or 10 or a molecule having at least 70%, 80,% 90% or 95% sequence homology thereto.

[0352] In a further aspect, there is provided binding molecule comprising a single variable heavy chain domain antibody that binds to CD137 and comprising a single variable heavy chain domain antibody that binds to PD-1, for example as described herein for use in simultaneously activating downstream signalling pathways of CD137 and PD-1 and independently leading to CD137 agonism or PD-1 downstream signalling inhibition; dual targeting of a cell expressing both CD137 and PD-1, or for localising the CD137 activation in the region of cells expressing PD-1 or localising the PD-1 down-modulation in the region of cells expressed CD137; dual targeting of a CD137 expressing cell and PD-1 expressing cell or down-modulating PD-1 on the cell surface. In one embodiment, the single variable heavy chain domain antibody that binds to PD-1 is a single variable heavy chain domain antibody that does not block PD-1 function when used on its own, that is when not used in a multispecific binding molecule with CD137. This can be selected from one of the molecules as set out in Tables 8, 9 or 10 or a molecule having at least 70%, 80,% 90% or 95% sequence homology thereto.

### Exemplary Immunoconjugates

[0353] In another aspect, there is provided an immunoconjugate comprising a binding molecule described herein conjugated to at least one therapeutic and/or diagnostic agent i.e. an imagining agent.

### Exemplary Kits

[0354] In another aspect, the invention provides a kit for detecting cancer for diagnosis, treatment, prognosis or monitoring comprising a binding molecule of the invention. The kit may also comprise instructions for use. The kits may include a labeled binding molecule of the invention as described above and one or more compounds for detecting the label. Also provided is a binding molecule of the invention packaged in lyophilized form, or packaged in an aqueous medium. The kits may include reagent, (e.g. for reconstituting) and/or instructions for use and/or a device for administration.

[0355] Also provided is a binding molecule or pharmaceutical composition described herein with reference to the figures and examples. Unless otherwise defined herein, scientific and technical terms used in connection with the present disclosure shall have the meanings that are commonly understood by those of ordinary skill in the art. While the foregoing disclosure provides a general description of the subject matter encompassed within the scope of the present disclosure, including methods, as well as the best mode thereof, of making and using this disclosure, the following examples are provided to further enable those skilled in the art to practice this disclosure. However, those skilled in the art will appreciate that the specifics of these examples should not be read as limiting on the invention, the scope of which should be apprehended from the claims and equivalents thereof appended to this disclosure. Various further aspects and embodiments of the present disclosure will be apparent to those skilled in the art in view of the present disclosure.

[0356] All documents mentioned in this specification are incorporated herein by reference in their entirety, including references to gene accession numbers, scientific publications and references to patent publications.

“and/or” where used herein is to be taken as specific disclosure of each of the two specified features or components with or without the other. For example “A and/or B” is to be taken as specific disclosure of each of (i) A, (ii) B and (iii) A and B, just as if each is set out individually herein. Unless context dictates otherwise, the descriptions and definitions of the features set out above are not limited to any particular aspect or embodiment of the invention and apply equally to all aspects and embodiments which are described.

[0357] The invention is now further described in the non-limiting examples.

### EXAMPLES

### Example 1. Construction of Tg/TKO Mice

[0358] Triple knock-out mice carrying a human heavy-chain antibody transgenic locus in germline configuration within a background that is silenced for endogenous heavy and light chain antibody expression were created and immunised as previously described (WO2004/076618, WO2003/000737, Ren et al., Genomics, 84, 686, 2004; Zou et al., J. Immunol., 170, 1354, 2003 and WO2016/062990, WO2018/127709, WO2018/127710).

### Example 2. Immunisation Protocol

[0359] For CD137 immunisation, Tg/TKO mice aged 8-12 weeks were immunised with a human CD137-human Fc chimeric protein. PD-1 binding Humabody® V_{H} molecules were generated as described in WO2018/127709 and WO2018/127710.

### Example 3. Serum ELISA

[0360] Serum was collected from mice before and after immunisation and checked by ELISA for the presence of serum human CD137 reactive heavy chain antibodies in response to immunisation with CD137 antigen.

### Example 4. Generation of Libraries from Immunised Mice

[0361] Generation of libraries from immunised mice described above followed standard protocols of library generation and has been described elsewhere, e.g. WO2018/127709 and WO2018/127710.

### Example 5. Selection Strategies: CD137 Binding V_{H} Isolation and Optimisation

[0362] Preparation of library phage stocks and phage display selections were performed according to published methods (Antibody Engineering, edited by Benny Lo, chapter 8, p161-176, 2004; WO2018/127709).

### Example 6. Sequencing

[0363] Phage selection outputs were subcloned into a soluble expression vector and plates of representative clones from each output were sequenced. Following sequencing analysis, unique individual V_{H} clones were identified and assigned to sequence families based on CDR3 homology. All unique V_{H} were purified and characterised as described below. Further clones were generated by sequence optimisation of clone Humabody® 003BB1172-E01 respectively to revert sequence to germline.

[0364] Table 7 shows the sequences of 003BB1172-E01 and sequence optimised variants.

### Example 7. Preparation of Purified V_{H}

[0365] Humabody® V_{H} were purified from the supernatants of E. coli (with pJ401), Pichia pastoris (with pJ912, pD912 or pPZ-alpha) and Expi HEK293 (with pTT5 vector) by using the native protein properties or a C-terminal 6×HIS tag for affinity and other chromatographic purification according to standard procedures.

### Example 8: Screening of Purified Humabody® V_{H} for Binding to CHO Human CD137 Cells and Recombinant Full Length Human and Rhesus ECD and Human ECD Fragments

[0366] Following selections of the libraries, specific V_{H} that bound to CHO cells expressing human CD137, domains 1-2 of human CD137 ECD, domains 1-3 of human CD137 ECD and human and rhesus full length CD137 ECD were identified by screening of purified Humabody® V_{H}.

[0367] Binding of purified His-tagged V_{H} to CHO human CD137 cells and to CHO parent cells for determination of non CD137 specific binding was assessed using Fluorescence Microvolume Assay Technology (FMAT). Fluorescence emission was measured on the TTP Mirrorball plate reader in the FL2 (502 nm-537 nm) and FL5 (677-800 nm) channels following excitation at 488 nm and 640 nm. Data was gated on FL5 perimeter and peak intensity and the FL2 median mean fluorescence intensity of the gated data used for determination of V_{H} binding.

[0368] Binding of purified His-tagged V_{H} to full length human CD137 (Acro Bio 41B-H5258), domains 1-3 human CD137 (In-house), domains 1-2 human CD137 (In-house) and full-length rhesus CD137 (Sino Biologics 90847-K02H) was assessed by Homogeneous Time Resolved Fluorescence (HTRF) assay. For the HTRF assays all the recombinant CD137 proteins contained huFc tag and the samples and reagents were prepared in buffer containing PBS, 0.1% BSA and 0.4M Potassium Fluoride and Serial dilutions of the V_{H} were incubated with the individual recombinant CD137huFc proteins together with 1 nM anti-human Fc cryptate (Cisbio, 61HFCKLA), and 20 nM anti-HIS D2 (Cisbio, 61HisDLA) in black 384 shallow well plates (Costar 3676) and overnight at 4° C. The Time resolved fluorescent emission at 620 nm and 665 nm was measured following excitation at 337 nm on the BMG PHERAstar plate reader. The HTRF counts=(665 emission/620 nm emission)*10000 with the results expressed as Delta F % calculated according to manufacturers instruction.

### Example 9: Generation of Multivalent Constructs

[0369] DNA sequences encoding Humabody® V_{H} specific for CD137, a V_{H} specific for PD-1 and a V_{H} specific for Human Serum Albumin (HSA) were amplified by PCR. They were assembled into larger fragments, with the V_{H} sequences flanked by linkers encoding glycine/serine-rich sequences and ligated into an expression vector by a restriction enzyme-based method. Plasmids were transformed into microbial expression systems as per standard techniques. The presence of Humabody® V_{H} sequences was verified by a standard colony PCR technique. Insert sequences were then confirmed by Sanger sequencing using vector-specific and internal primers to ensure complete sequence coverage. Sequences for exemplary constructs for CD137 and PD-1 are shown herein.

[0370] TPP-1293 and TPP-1294 include PD-1 binders that block PD-1 binding to its ligand PD-L1 and PD-1 signalling. The other constructs include PD-1 binders that do not block PD-1 binding to PD-L1.

[0371] TPP-1293 and TPP-1294 have been prepared and are being expressed. Exemplary HSA binding single V_{H} domain antibodies for use in the constructs are shown below in table 13.

TABLE 13

| | | | | SEQ ID |
|---|---|---|---|---|
| | | | | Full |
| Name | CDR1 | CDR2 | CDR3 | V_{H} |
| HSA1 | SEQ ID | SEQ ID | SEQ ID | SEQ ID |
| | NO: 1820 | NO: 1821 | NO: 1822 | NO: 1823 |
| | HYAMH | GISWNGN | DSSLFIV | EVQLVES |
| | | KITYADS | GAPTFEH | GGGLVQP |
| | | VKG | | GRSLRLS |
| | | | | CAASGFT |
| | | | | FHHYAMH |
| | | | | WVRQAPG |
| | | | | KGLEWVS |
| | | | | GISWNGN |
| | | | | KITYADS |
| | | | | VKGRFTI |
| | | | | SRDNAKN |
| | | | | SLYLQMN |
| | | | | SLRAEDT |
| | | | | ALYYCVR |
| | | | | DSSLFIV |
| | | | | GAPTFEH |
| | | | | WGRGTLV |
| | | | | TVSS |
| HSA2 | SEQ ID | SEQ ID | SEQ ID | SEQ ID |
| | NO: 1824 | NO: 182 | NO: 1826 | NO: 1827 |
| | NYNMN | 5SISSAGT | DPHSTGW | EVQLVES |
| | | HIYYADS | YKDFDY | GGGLVKP |
| | | VKG | | GGSLRLS |
| | | | | CAASGFT |
| | | | | FSNYNMN |
| | | | | WVRQAPG |
| | | | | KGLEWVS |
| | | | | SISSAGT |
| | | | | HIYYADS |
| | | | | VKGRFTI |
| | | | | SRDNAKN |
| | | | | SLYLQMN |
| | | | | SLRAEDT |
| | | | | AVYYCAR |
| | | | | DPHSTGW |
| | | | | YKDFDYW |
| | | | | GQGTLVT |
| | | | | VSS |
| HSA13 | SEQ ID | SEQ ID | SEQ ID | SEQ ID |
| | NO: 1828 | NO: 1829 | NO: 1830 | NO: 1831 |
| | SYTMN | SISSSGR | DPRMVGN | EVQLLES |
| | | YIYYADS | PHEFDl | GGGLVKP |
| | | VKG | | GGSLRLS |
| | | | | CAASGFT |
| | | | | VSSYTMN |
| | | | | WVRQAPG |
| | | | | KGLEWVS |
| | | | | SISSSGR |
| | | | | YIYYADS |
| | | | | VKGRFTI |
| | | | | SRDNAKN |
| | | | | SLYLQMN |
| | | | | SLRAEDT |
| | | | | AVYYCAR |
| | | | | DPRMVGN |
| | | | | PHEFDIW |
| | | | | GQGTMVT |
| | | | | VSS |

[0372] Exemplary PSMA binding single V_{H} domain antibodies for use in the constructs with CD137 single V_{H} domain antibodies are shown below in table 14.

TABLE 14a

| | | | | SEQ ID |
|---|---|---|---|---|
| Name | CDR1 | CDR2 | CDR3 | full V_{H} |
| PSMA1 | SEQ ID | SEQ ID NO: | SEQ ID | SEQ ID |
| | NO: | 1833 | NO: | NO: 1835 |
| | 1832 | YISY | 1834 | EVQLVESG |
| | GYGMH | DGSN | DPAW | GGWQPGRS |
| | | KYYA | GLRL | LRLSCAAS |
| | | DSVK | GESS | GFSFSGYG |
| | | G | SYDF | MHWVRQAP |
| | | | DI | GKGLEWVA |
| | | | | YISYDGSN |
| | | | | KYYADSVK |
| | | | | GRFTISRD |
| | | | | NSKNTLYL |
| | | | | QMNSLRAE |
| | | | | DTAVYYCA |
| | | | | KDPAWGLR |
| | | | | LGESSSYD |
| | | | | FDIWGQGT |
| | | | | MVTVSS |
| PSMA2 | SEQ ID | SEQ ID | SEQ ID | SEQ ID |
| | NO: | NO: | NO: | NO: 1839 |
| | 1836 | 1837 | 1838 | EVQLLESG |
| | SYALS | SIGE | DGVH | GGLVQPGG |
| | | NDGT | | SLRLSCAA |
| | | TDYA | | SGFSFSSY |
| | | DAVK | | ALSWVRQA |
| | | G | | PGKGLEWV |
| | | | | SSIGENDG |
| | | | | TTDYADAV |
| | | | | KGRFTISR |
| | | | | DNSKNTLY |
| | | | | LQMNSLRV |
| | | | | EDTAVYYC |
| | | | | VKDGVHWG |
| | | | | QGTLVTVS |
| | | | | S |

TABLE 15
Exemplary multivalent constructs CD137 + PSMA

SEQ ID NO: 1840 TPP-799 PSMA-6GS-CD137-6GS-HSA Protein
SEQ ID NO: 1841 TPP-799 Nucleotide
SEQ ID NO: 1842 TPP-800 PSMA-6GS-CD137-6GS-HSA Protein
SEQ ID NO: 1843 TPP-800 Nucleotide
SEQ ID NO: 1844 TPP-801 PSMA-6GS- CD137-6GS-HSA Protein
SEQ ID NO: 1845 TPP-801 Nucleotide
SEQ ID NO: 1846 TPP-802 PSMA-6GS- CD137-6GS-HSA Protein
SEQ ID NO: 1847 TPP-802 Nucleotide
SEQ ID NO: 1848 TPP-805 PSMA-6GS- CD137-6-6GS-HSA Protein
SEQ ID NO: 1849 TPP-805 Nucleotide
SEQ ID NO: 1850 TPP-806 PSMA-6GS- CD137-6GS-HSA Protein
SEQ ID NO: 1851 TPP-806 Nucleotide

### Example 10. Testing of Purified V_{H}

[0373] The molecules tested in the experiments below are based on the TPP constructs and sequences as shown herein. Where appropriate, molecules comprised a C terminal sequence, such as a purification tag (e.g. His tag).

[0374] a) Binding Assays

[0375] Purified Humabody® V_{H} were tested for binding to human CD137 protein, tumour necrosis factor receptor family members OX40 and GITR (Glucocorticoid-induced TNFR-related), CD40 and HVEM, CHO human CD137 cells, CHO PD1 cells and CHO parent cells.

TABLE 16
Binding of V_{H} to CD137 and TNFR family members

| | ELISA | | | | |
|---|---|---|---|---|---|
| | Human | Human | Human | Human | Human |
| Humabody ® ID | CD137 | GITR | OX40 | CD40 | HVEM |
| 003BB172-E01 | + | − | − | − | − |
| 003BB172-E01-14 | + | − | − | − | − |

No binding (−),
Binding measured (+)

[0376] Specificity of binding for CD137 over the tumour necrosis factor receptor family members OX40, GITR (Glucocorticoid-induced TNFR-related), CD40 and HVEM was determined using an ELISA assay. Nunc Maxisorp plates were coated with 1 ug/ml human CD137-Fc recombinant protein (Acro Biosystems 41B-H5258), human GITR-Fc (R&D Systems cat no. 689-GR) human OX40-Fc (R&D Systems cat no. 3388-OX), human CD40 (R&D Systems cat no. CDO-H5253), human HVEM (R&D Systems cat no. HVM-H5258) in PBS overnight at 4° C. then washed twice with PBS. Non-specific protein interactions were blocked by incubation with 1% (w/v) skimmed milk powder (Marvel®) in PBS/0.1% Tween-20 for 1 hour at room temperature. Plates were washed twice with PBS then V_{H} or antibody control (1 ug/ml) added for 1 hour at room temperature. Following three washes with PBS/0.1% Tween-20 a 1:1000 dilution of anti His-HRP (V_{H} detection) or anti mouse-HRP (positive control mouse monoclonal antibody detection) was added in 1% Marvel/PBS/0.1% Tween-20. The detection antibodies were allowed to bind for 1 hour at room temperature then the plates were washed twice in PBS/0.1% Tween-20 and once in PBS. The ELISA was developed using TMB substrate and the reaction was stopped by the addition of 50 ul 0.5M H₂SO₄ solution. The absorbance at 450 nm was measured using the BMG Pherastar. Both V_{H} tested bound to CD137 but did not bind to GITR, OX40, CD40 or HVEM.

TABLE 17
Binding of Humabody ® V_{H} to CHO-CD137 and CHO-PD1 cells

| | FMAT/Mirrorball | | Flow Cytometry | | |
|---|---|---|---|---|---|
| | CHO huCD137 | CHO huPD1 | CHO huCD137 | CHO huPD1 | CHO |
| Humabody | EC50 (M) | EC50 (M) | EC50 (M) | EC50 (M) | parent |
| 003BB172-E01 | 1.73E−09 | ND | ND | ND | ND |
| 003BB172-E01-1 | 1.35E−09 | ND | ND | ND | ND |
| 003BB172-E01-2 | 1.74E−09 | ND | ND | ND | ND |
| 003BB172-E01-3 | 1.06E−09 | ND | ND | ND | ND |
| 003BB172-E01-4 | 1.33E−09 | ND | ND | ND | ND |
| 003BB172-E01-5 | 1.29E−09 | ND | ND | ND | ND |
| 003BB172-E01-6 | 1.08E−09 | ND | ND | ND | ND |
| 003BB172-E01-7 | 1.28E−09 | ND | ND | ND | ND |
| 003BB172-E01-8 | 1.08E−09 | ND | ND | ND | ND |
| 003BB172-E01-9 | 8.49E−10 | ND | ND | ND | ND |
| 003BB172-E01-10 | 1.22E−09 | ND | ND | ND | ND |
| 003BB172-E01-11 | 1.21E−09 | ND | ND | ND | ND |
| 003BB172-E01-12 | 1.21E−09 | ND | ND | ND | ND |
| 003BB172-E01-13 | 9.54E−10 | ND | ND | ND | ND |
| 003BB172-E01-14 | 1.29E−09 | ND | ND | ND | ND |
| TPP-942 | 1.57E−10 | 1.64E−10 | ND | ND | ND |
| TPP-943 | 2.07E−10 | 1.44E−10 | ND | ND | ND |
| TPP-950 | 7.35E−10 | 8.44E−10 | ND | ND | ND |
| TPP-951 | 4.19E−10 | 8.05E−10 | ND | ND | ND |
| TPP-957 | 1.17E−09 | 7.66E−10 | ND | ND | ND |
| TPP-958 | 4.99E−10 | 3.46E−10 | ND | ND | ND |
| TPP-969 | 1.71E−10 | 1.42E−10 | 1.16E−08 | ND | NB |
| TPP-971 | 2.23E−10 | 4.14E−10 | ND | ND | ND |
| TPP-972 | 5.33E−11 | 1.50E−10 | ND | 3.30E−08 | NB |
| TPP-973 | 7.81E−11 | 4.81E−10 | 5.95E−10 | 1.08E−07 | NB |
| TPP-975 | 3.90E−10 | 7.92E−10 | ND | ND | ND |
| TPP-982 | 8.96E−11 | 3.32E−10 | ND | ND | ND |
| TPP-983 | 4.43E−11 | 2.40E−10 | ND | ND | ND |
| TPP-984 | 3.14E−10 | 2.64E−10 | ND | ND | ND |
| TPP-985 | 3.82E−10 | 5.41E−10 | ND | ND | ND |
| TPP-1010 | 1.01E−10 | 1.62E−10 | 9.39E−09 | 5.31E−10 | NB |
| TPP-1023 | 1.45E−10 | 6.26E−10 | ND | ND | ND |
| TPP-1025 | ND | 1.23E−09 | ND | ND | ND |
| TPP-1027 | 6.72E−11 | 1.73E−10 | 1.47E−09 | 5.01E−09 | NB |
| TPP-1028 | 1.51E−10 | 5.83E−10 | 1.99E−09 | 2.27E−08 | NB |
| TPP-1245 | ND | ND | 4.404E−09 | 1.83E−07 | ND |
| TPP-1246 | ND | ND | 2.48E−09 | 2.05E−08 | ND |
| TPP-1247 | ND | ND | 3.39E−09 | 2.54E−08 | ND |
| TPP-1290 | ND | ND | 4.451E−09 | 2.27E−08 | ND |
| TPP-1293 | ND | ND | ND | 4.48E−08 | ND |

Not determined (ND),
No binding (NB)

[0377] Binding of His-tagged molecules to CHO human CD137, CHO parent and CHO human PD1 cells was assessed using Fluorescence Microvolume Assay Technology (FMAT). All reagents were prepared in FMAT assay buffer (pH 7.4) containing PBS, 0.1% Bovine Serum Albumin, 0.05% Sodium Azide. Serially diluted samples were transferred into 384 well black clear-bottomed assay plates (Costar cat. no. 3655) and incubated for a minimum of 2 hours at room temperature with 1.5 nM Anti-His (Millipore cat. no. 05-949), 3 nM Goat Anti-Mouse Alexa Fluor-488 (Jackson ImmunoResearch cat. no. 115-545-071) and 2000 cells/well pre-stained with DRAQ5 (Thermo Scientific cat. no. 62251). Fluorescence emission was then measured on the TTP Mirrorball plate reader in the FL2 (502 nm-537 nm) and FL5 (677-800 nm) channels following excitation at 488 nm and 640 nm. Data was gated on FL5 perimeter and peak intensity and the FL2 median mean fluorescence intensity of the gated data used for determination of V_{H} binding. Example EC₅₀ values for binding are shown in table 9. Monovalent CD137 specific Humabody® V_{H}, and trispecific molecules with a CD137 binding arm bound to CHO CD137 expressing cells. Trispecific Humabody® V_{H}, with a PD1 binding arm bound to PD1 expressing cells.

[0378] Binding of His-tagged V_{H} samples was tested in a washed FACS assay using CHO cells lines expressing human PD-1 and human CD137 that were previously generated using standard methods. Briefly, CHO PD-1, CHO CD137 and CHO parent cells were plated (5000/well) in FACS buffer (PBS+2% FBS+0.1% BSA+0.02% Azide) into a 96-well V-bottom plate. V_{H} samples were serially diluted in assay media (PBS+0.1% BSA), added to respective wells of the plate and cells were incubated on ice for 45 minutes, protected from light. Cells were washed twice with FACS buffer and a detection mix containing 20 nM biotinylated anti-His primary antibody and 40 nM Streptavidin Alexa Fluor 647 (AF647) secondary antibody was added. Cells were incubated on ice for 30 minutes, protected from light. Cells were washed twice with FACS buffer, fixed and analysed for AF647 median fluorescence using an Intellicyt iQue Screener Plus.

[0379] Binding of AlexaFluor AF488-labelled Humabody® V_{H} samples was tested in a washed FACS assay using CHO cell lines expressing human PD-1 and human CD137 that were previously generated using standard methods. Briefly, CHO PD-1 and CHO CD137 cells were thawed, counted, resuspended at 2e⁴/well in FACS buffer (PBS+2% FBS+0.1% BSA+0.02% Azide) and plated into a 96-well V-bottom plate. V_{H} samples were serially diluted in FACS buffer and added to respective wells of the plate. The plate was then incubated on ice for 30 minutes, protected from light. Cells were washed twice with FACS buffer and finally resuspended in FACS buffer containing Sytox RED as Live/Dead detector. Cells were then analysed for AF488 median fluorescence using an Intellicyt iQue Screener (FIG. 5).

[0380] To confirm that our lead molecules target a different epitope on the PD1 receptor from the commercially available Pembrolizumab, a competition assay was setup using the FMAT (Fluorescence Microvolume Assay) Technology, which measures cell associated fluorescence within a defined volume at the bottom of the well of the assay plate. In this assay, binding of AF488-labelled Humabody® V_{H} was measured in presence of an excess (150 nM) of Pembrolizumab and compared to binding of Humabody® V_{H} in buffer. CHO cells stably expressing huPD1 were thawed at 37° C., counted, re-suspended in assay media (PBS+0.1% BSA+0.05% Sodium Azide) and plated at 1e5 cells/ml in a 384 well assay plate. Serial dilutions of test molecules were prepared in assay media in a 384 well plate and added to the assay plate, followed by addition of either buffer or excess of Pembrolizumab. After 2 hours incubation at room temperature, the plate was read with the TPP Mirrorball plate reader to measure FL2 emission (502-537 nm). Data was plotted with a 4 parameters non-linear regression equation: Y=Bottom+(X\hat{ }Hillslope)*(Top−Bottom)/(X\hat{ }HillSlope+EC50\hat{ }HillSlope) (FIG. 6).

TABLE 22
NanoBiT ® Cell based Protein Interaction Assay

| Humabody | EC50 (M) |
|---|---|
| TPP-1246 | 2.51E−11 |
| TPP-1290 | 5.145E−11 |
| TPP-1438 | 1.05E−10 |
| TPP-1439 | 1.481E−10 |
| TPP-1437 | 1.192E−09 |
| TPP-1409 | 2.588E−11 |
| TPP-1410 | 5.316E−11 |

[0381] The ability of the CD137-PD1 bispecific Humabody® V_{H} to bind in -cis to both targets simultaneously on the same cell was assessed in the NanoBiT® cell based protein interaction assay. The NanoBiT® technology provides a method for direct analysis of protein interactions in live cells. NanoBiT® assays rely on a two-subunit system based on NanoLuc® luciferase that can be used for intracellular detection of protein:protein interactions. The subunits are fused to proteins of interest, forming a functional enzyme that generates a bright, luminescent signal when the proteins interact. Two stable cell lines were generated in house with CD137 and PD1 individually fused to subunits of NanoLuc® luciferase. Serial dilutions of CD137-PD1 bispecific Humabody® V_{H} were prepared in assay media (HAM12+10% FBS) in a 96 well V bottom plate. 2.5×10⁵ cells were plated in a 96 flat bottom TC white plate and serially diluted samples added. After a 7-hour incubation at 37° C. in a CO₂ incubator the level of luciferase reporter expression was determined by addition of NanoGlo reagent (Promega N1120) and measurement of luminescent signal on the BMG Pherastar. Fold Increase over background values (buffer only) were calculated, and data was plotted with a 4 parameters nonlinear regression equation:

$$Y = Bottom + ( X \hat{} Hillslope ) * ( Top - Bottom ) / ( X \hat{} HillSlope + EC 50 \hat{} HillSlope ) .$$

TABLE 23
Binding to pre-stimulated human CD8+ cells
Average EC₅₀ values for binding of bispecific molecules with a CD137
and PD1 binding arm bound to pre-stimulated CD8+ cells are shown in
table below. Data shown is the average of binding from 2 separate donors.

| Humabody | EC50 (M) |
|---|---|
| TPP-1290 | 1.49E−09 |
| TPP-1246 | 2.22E−09 |

[0382] Binding of the labelled Humabody® V_{H} to PD1+/CD137+ cells was measured using flow cytometry. Peripheral blood mononuclear cells (PBMCs) were isolated from human blood by density gradient centrifugation then CD8+ T cells purified using a negative selection isolation kit according to the manufacturer's protocol (Stem cell technologies cat no 17953). T-cells were stimulated with PMA/lonomycin for 48 hours in RPMI media supplemented with 10% FBS, 2 mM Glutamine, 1× Pen/Strep. Cells were transferred into a 96 well v bottom plates, washed in staining buffer (PBS/1% BSA/0.05% Sodium Azide 10 μg/ml HSA) then incubated with serially diluted (starting from 100 nM) directly labelled Alexa Fluor-488 V_{H}. Cells were washed by centrifugation then antibody mix containing CD137 (Mouse anti human Biolegend catalogue no. 329910) and PD1 (Mouse anti human Biolegend catalogue no. 309820) were added followed by a 30-minute incubation on ice. A Live Dead near IR stain (Molecular Probes cat no. L10119) was used for discrimination of live cells. After further washing cells were fixed and fluorescence measured by flow cytometry (Table 23 and FIG. 8).

TABLE 24
Binding to stimulated cynomolgus T cells
Average EC50 values for binding of bispecific molecules with a CD137
and PD-1 binding arm bound to activated CD137+ T cells are shown
in the table below. Binding was measured by flow cytometry.

| | Cynomolgus (n = 3) | Human control (n = 1) |
|---|---|---|
| Humabody | EC50 (M) | EC50 (M) |
| TPP-1246 | 3.63E−09 | 3.75E−09 |
| TPP-1290 | 7.17E−09 | 6.87E−09 |

[0383] Binding of the labelled Humabody® V_{H} to CD137+ cells was measured using flow cytometry. Cryopreserved human and cynomolgus peripheral blood mononuclear cells were thawed in the presence of 25 U/ml Benzonase. Cells were then resuspended in RPMI media supplemented with 10% FBS, 2 mM Glutamine and 1× Pen/Strep and stimulated with 1 ug/ml platebound anti-CD3 plus 0.5 ug/ml anti-CD28. T cells were expanded over 8 days in media supplemented with IL-7/IL15 before a fraction were stimulated by PMA/ionomycin for 16 hrs to induce CD137 and PD-1 expression. PMA/ionomycin stimulated and untreated cells were mixed to give a heterogeneous population then transferred to a V-bottom plate (10⁵/well) and stained for viability (Molecular Probes cat.no. L10119). Cells were incubated on ice for in PBS/2 mM EDTA/1% cyno serum plus Alexa Fluor 488 labelled V_{H}, serially diluted from 100 nM. After 1 hr cells were washed (×2) and stained for expression of cell surface of CD137 (Biolegend cat.no. 309824) and PD1 (Biolegend cat. No. 329906) for 30 mins on ice. Cells were again washed (×2) before analysis of V_{H} binding to viable activated (CD137+) and non-activated (CD137-) T cells by flow cytometry (Table 24).

TABLE 18
Kinetics of binding of monovalent V_{H} to human CD137 and rhesus CD137

| | Human CD137 | | | Rhesus CD137 | | |
|---|---|---|---|---|---|---|
| CLONE NAME | KD (M) | kon(1/Ms) | kdis(1/s) | KD (M) | kon(1/Ms) | kdis(1/s) |
| 003BB172-E01 | 2.04E−08 | 6.31E+04 | 1.29E−03 | 2.75E−08 | 4.78E+04 | 1.31E−03 |
| 003BB172-E01-1 | 1.78E−08 | 1.20E+05 | 2.14E−03 | 2.19E−08 | 1.22E+05 | 2.67E−03 |
| 003BB172-E01-2 | 1.86E−08 | 7.32E+04 | 1.37E−03 | 2.59E−08 | 6.13E+04 | 1.59E−03 |
| 003BB172-E01-3 | 2.45E−08 | 6.60E+04 | 1.61E−03 | 2.48E−08 | 5.53E+04 | 1.57E−03 |
| 003BB172-E01-4 | 2.57E−08 | 7.16E+04 | 1.84E−03 | 3.22E−08 | 6.71E+04 | 2.16E−03 |
| 003BB172-E01-5 | 1.49E−08 | 9.06E+04 | 1.35E−03 | 1.15E−08 | 1.42E+05 | 1.64E−03 |
| 003BB172-E01-6 | 2.67E−08 | 8.66E+04 | 2.31E−03 | 3.90E−08 | 7.36E+04 | 2.87E−03 |
| 003BB172-E01-7 | 2.32E−08 | 8.59E+04 | 1.99E−03 | 4.07E−08 | 5.73E+04 | 2.33E−03 |
| 003BB172-E01-8 | 2.45E−08 | 6.60E+04 | 1.61E−03 | 4.14E−08 | 6.5E+04 | 2.69E−03 |
| 003BB172-E01-9 | 1.75E−08 | 1.16E+05 | 2.03E−03 | 2.30E−08 | 1.02E+05 | 2.35E−03 |
| 003BB172-E01-10 | 2.14E−08 | 9.11E+04 | 1.95E−03 | 3.69E−08 | 6.74E+04 | 2.49E−03 |
| 003BB172-E01-11 | 2.10E−08 | 1.13E+05 | 2.38E−03 | 3.31E−08 | 7.25E+04 | 2.40E−03 |
| 003BB172-E01-12 | 2.00E−08 | 9.44E+04 | 1.89E−03 | 3.86E−08 | 5.97E+04 | 2.30E−03 |
| 003BB172-E01-13 | 2.11E−08 | 9.87E+04 | 2.08E−03 | 2.28E−08 | 1.11E+05 | 2.53E−03 |
| 003BB172-E01-14 | 2.21E−08 | 9.21E+04 | 2.03E−03 | 2.59E−08 | 6.13E+04 | 1.59E−03 |

[0384] Binding kinetics of purified monovalent V_{H} molecules were measured on a ForteBio Octet RED 384 instrument. Human and Rhesus CD137-Fc tagged protein was diluted to 5 μg/ml in kinetics buffer (0.05% Tween, 1×PBS) and coupled to Protein G biosensors (ForteBio cat no. 18-5082) via the Fc tag. V_{H} were serially diluted (typically 1:2 dilution series starting with 200 nM, V_{H} at the highest concentration) and binding to the CD137-Fc-coupled Protein G biosensors measured. Binding kinetics were determined from the (blank subtracted) sensor gram trace using 1:1 binding models and ForteBio Octet Data Analysis 9.0 software. Example kinetic and binding affinity data obtained is shown Table 18 (monovalent V_{H}). In this assay format monomer V_{H} bound hCD137-Fc with affinities of between 14.9 nM and 26.7 nM and rhCD137-Fc with affinities between 11.5 nM and 41.4 nM.

TABLE 19
Kinetics of binding of CD137-PD1 Humabody ®
V_{H} to human CD137 and human PD1

| | Human CD137 | | | Human PD1 | | |
|---|---|---|---|---|---|---|
| Humabody | kon(1/Ms) | kdis(1/s) | KD (M) | kon(1/Ms) | kdis(1/s) | KD (M) |
| TPP-969 | 1.22E+05 | 2.55E−03 | 2.09E−08 | 6.85E+04 | 9.15E−04 | 1.34E−08 |
| TPP-972 | 1.54E+06 | 1.55E−05 | 1.00E−11 | 6.43E+04 | 7.61E−04 | 1.18E−08 |
| TPP-973 | 2.37E+05 | 2.57E−05 | 1.08E−10 | 1.95E+05 | 1.40E−02 | 7.16E−08 |
| TPP-1010 | 1.73E+05 | 3.66E−03 | 2.11E−08 | 4.98E+05 | 2.74E−03 | 5.50E−09 |
| TPP-1027 | 1.25E+06 | 2.87E−05 | 2.30E−11 | 4.13E+05 | 2.46E−03 | 5.95E−09 |
| TPP-1028 | 6.74E+05 | 1.90E−05 | 2.81E−11 | 4.03E+05 | 2.35E−03 | 5.83E−09 |
| TPP-1245 | 3.81E+05 | 1.79E−04 | 4.71E−10 | 8.69E+05 | 7.62E−02 | 8.76E−08 |
| TPP-1246 | 3.45E+05 | 1.87E−04 | 5.41E−10 | 2.41E+05 | 2.02E−03 | 8.38E−09 |
| TPP-1247 | 3.34E+05 | 9.85E−05 | 2.95E−10 | 2.76E+05 | 2.14E−03 | 7.77E−09 |
| TPP-1290 | 2.83E+05 | 1.85E−04 | 6.52E−10 | 3.45E+05 | 2.44E−03 | 7.07E−09 |
| TPP-1293 | 5.86E+04 | 1.51E−04 | 2.57E−09 | 9.15E+04 | 2.12E−04 | 2.31E−09 |
| TPP-1408 | 4.03E+04 | 3.83E−03 | 9.51E−08 | 2.55E+05 | 1.13E−03 | 4.45E−09 |
| TPP-1409 | 1.52E+05 | 3.07E−04 | 2.02E−09 | 5.80E+05 | 2.41E−03 | 4.16E−09 |
| TPP-1410 | 8.18E+04 | 1.21E−04 | 1.47E−09 | 2.96E+05 | 2.24E−03 | 7.57E−09 |
| TPP-1411 | 1.08E+05 | 2.08E−04 | 1.93E−09 | 5.37E+05 | 2.67E−03 | 4.98E−09 |
| TPP-1438 | 5.00E+05 | 1.10E−04 | 6.20E−10 | 5.27E+05 | 5.02E−05 | 9.51E−11 |
| TPP-1439 | 8.00E+05 | 1.07E−04 | 5.06E−10 | 7.50E+05 | 5.12E−05 | 6.83E−11 |

TABLE 25
Kinetics of binding of CD137-PD1 Humabody ® V_{H} to
cynomolgus macaque CD137 and cynomolgus macaque PD1

| | Cyno CD137 | | | Cyno PD1 | | |
|---|---|---|---|---|---|---|
| Humabody | kon(1/Ms) | kdis(1/s) | KD (M) | kon(1/Ms) | kdis(1/s) | KD (M) |
| TPP-1245 | 3.61E+05 | 2.63E−04 | 7.28E−10 | 4.93E+05 | 5.05E−02 | 1.02E−07 |
| TPP-1246 | 3.17E+05 | 2.67E−04 | 8.42E−10 | 2.27E+05 | 4.64E−03 | 2.05E−08 |
| TPP-1247 | 3.13E+05 | 1.70E−04 | 5.43E−10 | 2.93E+05 | 4.94E−03 | 1.69E−08 |
| TPP-1290 | 2.47E+05 | 2.55E−04 | 1.03E−09 | 3.10E+05 | 5.39E−03 | 1.74E−08 |
| TPP-1293 | 5.22E+04 | 2.26E−04 | 4.34E−09 | 1.19E+05 | 4.07E−04 | 3.41E−09 |

[0385] For Humabody® V_{H}, TPP-969, 972, 973, 1010, 1027 and 1028 the Biacore 8K instrument was used to study the interaction between Humabody® V_{H} with biotinylated human CD137-His and biotinylated human PD-1-His tagged protein by surface plasmon resonance (SPR). Multi cycle kinetics assays were then used to evaluate the kinetics and affinity of the interaction. Experiments were performed at 250° C. in HBS-EP+ assay buffer with a flow rate of 30 μl/minute. A streptavidin chip (Streptavidin (SA), Series S, GE Healthcare BR100531) was used to capture the biotinylated human CD137 or human PD-1 reaching a maximum of 75RU or 200RU respectively. A second flow cell without any captured antigen was used as the reference cell. A five point, 3-fold dilution series of Humabody® V_{H} was made based on the expected KD with a top concentration approximately 10-fold above the expected KD. The binding kinetics were followed by flowing these over the chip surface. The contact time for the binding steps was 360 or 180 seconds and the dissociation step was 3600 or 1200 seconds for human CD137 and PD1 respectively. After each run, the sensors were regenerated with glycine pH 1.5 to remove the captured Humabody® V_{H}. The data was fitted to a 1:1 binding model after reference subtraction using the Biacore Evaluation software. Example kinetic and binding affinity data obtained is shown Table 19.

[0386] For Humabody® V_{H}, TPP-1245, 1246, 1247, 1290, 1293, 1408, 1409, 1410, 1411, 1438 and 1439, recombinant Fc-tagged ectodomains of human CD137 (Acro Biosystems 41B-H5258) and PD1 (Acro Biosystems PD1-H5257) or cynomolgus CD137 (R&D S9324-4b) and PD1 (Acro Biosystems PD1-C5254) were captured on a Protein G sensor chip (GE Healthcare 29179315). Binding of Humabody® V_{H} constructs was measured using a single-cycle kinetics method using the BIAcore 8K instrument with 90 second sample injections with a sample concentration range of low nanomolar to high nanomolar. Dissociation was observed for at least 600 seconds and the samples were run at a flow rate of at least 50 μl/min. The Protein G sensor surface was regenerated with a 20 second injection of 10 mM Glycine buffer, pH 1.5 (GE Healthcare BR100354). Data were analysed using a 1:1 binding model in Biacore Insight Evaluation software, including Humabody® V_{H} constructs with two PD-1 arms. Example kinetic and binding affinity data obtained is shown Tables 19 and 25.

[0387] b) Functional Activity

### Jurkat Reporter Assay

[0388] The ability of monovalent V_{H}, to act as CD137 agonists was assessed in a reporter gene assay using Jurkat cells expressing CD137 and an NF-kB luciferase reporter gene. Their activity was compared to bivalent and trivalent molecules which have increased potential for avid interactions and to bispecific molecules consisting of CD137 V_{H} linked to a V_{H} that bound to the antigen PSMA or PD-1. In the bispecific molecule, CD137 agonism resulted from co-engagement of both CD137 and either the cell expressed PSMA or PD1.

[0389] PSMA or PD1 expressing cells or parental (non PSMA/PD1) expressing (5000/well) were plated overnight in media (RPMI 1640 supplemented with 10% FBS, 2 mM L-Glutamine, 1× Pen/Strep) into 384 well, white flat bottomed tissue culture treated plates. Serially diluted monovalent V_{H}, multivalent V_{H} and PSMA or PD-1/CD137 targeting bispecific molecules were prepared in media and added to the wells followed by Jurkat human CD137 NF-kB luciferase reporter gene cells (Promega). After a 5-6 hour incubation at 37° C. in a CO₂ incubator the level of luciferase reporter expression was determined by addition of BioGlo reagent (Promega G7940) and measurement of luminescent signal on the BMG Pherastar. FIG. 1 shows that monovalent V_{H}, did not increase reporter gene activity and thus do not have agonistic CD137 activity in this assay. Bispecific molecules activated the Jurkat reporter cells in the presence of PD-1 expressing cells (FIG. 1A plus FIGS. 9A and 9B) or PSMA expressing cells (FIG. 2) but not when co-cultured with parental (non PD-1) expressing cells (FIG. 1B). This demonstrates that dual target engagement of PSMA or PD-1 and CD137 with a monovalent CD137 binding arm results in agonistic CD137 activity.

TABLE 20
Activity in Jurkat-CD137/CHO-PD-1 Reporter Assay

| | Jurkat-CD137/CHO-PD-1 |
|---|---|
| Humabody | Reporter Assay EC50 (M) |
| TPP-942 | 5.74E−08 |
| TPP-943 | 2.57E−08 |
| TPP-950 | 4.30E−08 |
| TPP-951 | 1.41E−08 |
| TPP-957 | 1.10E−08 |
| TPP-958 | 1.09E−08 |
| TPP-969 | 1.11E−08 |
| TPP-971 | 7.18E−09 |
| TPP-972 | 3.21E−10 |
| TPP-973 | 2.54E−10 |
| TPP-975 | 1.15E−08 |
| TPP-982 | 5.70E−10 |
| TPP-983 | 5.56E−10 |
| TPP-984 | 1.18E−08 |
| TPP-985 | 2.17E−08 |
| TPP-1008 | 3.61E−09 |
| TPP-1009 | 3.47E−08 |
| TPP-1010 | 2.29E−09 |
| TPP-1011 | 4.11E−09 |
| TPP-1012 | 5.29E−09 |
| TPP-1014 | 5.48E−10 |
| TPP-1015 | 5.07E−10 |
| TPP-1016 | 6.98E−10 |
| TPP-1017 | 2.10E−10 |
| TPP-1018 | 2.73E−10 |
| TPP-1023 | 4.37E−10 |
| TPP-1025 | 5.09E−10 |
| TPP-1027 | 2.38E−10 |
| TPP-1028 | 3.12E−10 |
| TPP-1052 | 3.26E−09 |
| TPP-1245 | 1.129E−10 |
| TPP-1246 | 7.288E−11 |
| TPP-1247 | 5.829E−11 |
| TPP-1286 | 5.302E−11 |
| TPP-1290 | 2.000E−11 |
| TPP-1291 | 8.089E−11 |
| TPP-1293 | 1.129E−11 |
| TPP-1294 | 3.227E−11 |
| TPP-1295 | 8.751E−12 |
| TPP-1409 | 1.343E−10 |
| TPP-1438 | 4.658E−12 |
| TPP-1439 | 1.454E−11 |

TABLE 21
Activity in Jurkat-CD137/CHO-PSMA Reporter Assay

| | Jurkat-CD137/CHO-PSMA |
|---|---|
| Humabody | Reporter Assay EC50 (M) |
| TPP-799 | 5.60E−09 |
| TPP-800 | 8.50E−09 |
| TPP-801 | 1.30E−09 |
| TPP-802 | 2.00E−09 |
| TPP-805 | 1.60E−08 |
| TPP-806 | 9.30E−09 |

[0390] A Jurkat reporter cell line expressing human PD-1 and a luciferase reporter gene under the control of a promoter with an NFAT response element and a CHO cell line expressing a T-Cell Receptor activator and human PDL-1 under the control of a tetracycline inducible promotor were generated by standard methods.

[0391] Cells were prepared in bulk, then frozen and stored in liquid nitrogen. CHO human PDL-1/TCR activator cells were plated overnight (2000 cells/well) in Hams F12 containing 10% FBS, and 1 μg/ml tetracycline into 384 well, white flat-bottomed tissue culture treated plates (Corning 3570). Humabody® V_{H} samples were serially diluted in assay media (RPMI+2% FBS) and added to the plates followed by the Jurkat PD-1 reporter cells (5,000 cells/well). After a 6-hour incubation at 37° C. in a CO₂ incubator the level of luciferase reporter expression was determined by addition of NanoGlo reagent (Promega N1120) and measurement of luminescent signal on the BMG Pherastar. The data is expressed as fold over background where background is the cells with buffer only wells

[0392] FIG. 3 shows that antagonistic activity of a PD1 mAb in a PD1/PDL1 reporter assay was not impacted by the presence of the bispecific CD137-PD1 Humabody® V_{H}.

### Example 11: Stimulation of Primary Cells

TABLE 26
CD8+ T-cell activation assay - IL-2 release
EC50 values from a representative experiment for IL-2 release
with CD137-PD1 bispecific molecules are shown in table below.

| Humabody/Antibody | EC50 (M) |
|---|---|
| TPP-1246 | 1.76E−10 |
| TPP-1290 | 1.99E−10 |
| TPP-1293 | 1.46E−10 |
| Urelumab analog | 3.97E−10 |

### CD8+ T-Cell Activation Assay—IL-2 Release

[0394] Different bispecific molecules were tested for their ability to induce IL-2 release from CD8+ T cells in a co-culture assay. CHO PD-1 expressing cells were resuspended in media (RPMI 1640 supplemented with 10% FBS, 2 mM L-Glutamine, 1× Pen/Strep, 1 ug/ml tetracycline) and seeded at a density of 20000 per well onto 96 well flat bottom plates that had been pre-coated with 5 ug/ml anti CD3 antibody (Life Tech cat no. 16-0037-85). Cells were allowed to adhere overnight at 37° C., 5% CO₂. Peripheral blood mononuclear cells (PBMCs) were isolated from human blood by density gradient centrifugation and CD8+ T cells purified using a negative selection isolation kit according to the manufacturer's protocol (Stem Cell, cat no 17953). Humabody® V_{H}, molecules and Urelumab analog were prepared in media and added together with the T cells (100000 cells/well) to the assay plates. Supernatants were harvested after a 72-hour incubation at 37° C., 5% CO₂ and IL-2 levels quantified using a human IL-2 assay kit according to the manufacturer's instructions (Cisbio Cat no. 64IL2PEB) (Table 26 and FIG. 10).

### Stimulation of Superantigen-Activated Cells

[0395] PBMCs from healthy donors were stimulated with 1 ng/ml SEB (Staphylococcal enterotoxin B) for 16 hours prior to treatment. PBMCs were washed and plated at 100,000 cells per well. Humabodies were diluted serially into complete RPMI 1640 media before being added to each well. Additional SEB diluted in RPMI was also added to give a final concentration of 0.1 ng/ml SEB. Cells were cultured for 3 days at 37° C. and 5% CO₂. Following incubation, plates were centrifuged and cell-free supernatant was harvested and IL-2 was measured using DuoSet ELISA reagents on the MSD platform. FIG. 4 demonstrates the ability of the CD137-PD1 bispecific molecules to stimulate IL-2 production from SEB activated PBMCs.

### PBMC Activation Assay—Cytokine Secretion

[0396] PBMCs were isolated from healthy donor blood (NHS-BT) by density gradient centrifugation using Lymphoprep (StemCell Technologies), according to standard protocols. Cells were washed using sterile PBS, counted, and resuspended at a concentration of 1×10⁶ cells/ml in RPMI-1640 medium with L-gluatmine supplemented with 10% fetal bovine serum and 1% penicillin/streptomycin (assay medium). 50 μl (50,000 cells/well) of cells were plated into 96-well flat bottom plates previously coated overnight with 1 μg/ml anti-CD3 (OKT3 clone). Humabody® V_{H} samples were serially diluted in assay medium at 2× the final concentration and 50 μl was added to respective wells. Plates were incubated for 4 days at 37° C. in a 5% CO₂ incubator. On day 4, supernatants were harvested and IFN-γ levels quantified by HTRF using a human IFN-γ assay kit (Cisbio) according to the manufacturer's protocol. Delta ratio values of standard curves and samples were graphed and interpolated using GraphPad Prism (FIG. 11).

### Repetitive Stimulation Assay—Cytokine Secretion

[0397] PBMCs from healthy donors were repetitively stimulated with plate bound anti-CD3 and soluble anti-CD28 antibodies at final concentration of 0.5 ug/ml for 7 days. On day 7 repetitively stimulated T cells were washed and co-cultured with autologous DC in presence of 1 ng/ml SEB (Staphylococcal enterotoxin B) and test compounds. Humabody® V_{H} and controls (Pembrolizumab analog, Urelumab analog and negative control) were tested at one concentration, in quadruplicates. The compounds were diluted into X-Vivo media+5% FBS before being added to each well. Cells were cultured for 2 days at 37° C. and 5% CO₂. Following incubation, plates were centrifuged, and cell-free supernatant was harvested, and IL-2 was measured using DuoSet ELISA reagents on the MSD platform. To investigate an impact of TPP-1246 on CD137 and PD-1 expression the cells were collected and stained post assay with fluorescence labelled commercially available antibodies: anti-PD-1 (EH12.2H7 clone), anti-CD137 (4B4-1clone), anti-CD8 (RPA-T8) and LDiRN. The cells treated with Pembrolizumab analog were used for gating PD-1+ cells, as it competes with EH12.2H7 clone for the same epitope. The cells treated with Urelumab analog were used for gating CD137+ cells, as it competes with 4B4-1 clone for the same epitope (FIG. 12).

### Repetitive Stimulation Assay—Receptor Expression

[0398] PBMCs from healthy donors were co-cultured with allogeneic DC (10:1 ratio) in the presence of 1 ng/ml SEB (Staphylococcal enterotoxin B) and CD137×PD-1 Humabody. The PBMCs prior to functional assay were stained with CellTrace™ Violet Cell Proliferation Kit (Thermo Fisher cat. no. C34557) according to the manufacturer's instructions to trace multiple generations using dye dilution by flow cytometry. PBMC were plated at 100000 cells per well. Humabody® V_{H} and controls were diluted serially into complete AIM-V media before being added to each well. Cells were cultured for 4 days at 37° C. and 5% CO₂. After 4 days of co-culture, the cells were collected and stained with fluorescence labelled commercially available antibodies: anti PD-1 (EH12.2H7 clone), anti-CD137 (4B4-1clone), anti-CD8 (RPA-T8) and LDiRN. All antibodies were from Biolegend. The divided cells were gated on CellTrace™ Violet. Data acquisition was performed using an iQue flow cytometer, and the analysis was performed using FlowJo software (FIGS. 13A & 13B and 14).

### Exhaustion Assay

[0399] Monocytes were isolated from healthy PBMC donors using a human monocyte kit (Miltenyi Biotec) and cultured in serum free medium supplemented with interleukin 4 (IL-4) and granulocyte-macrophage colony-stimulating factor (GM-CSF) for 5 days after which monocytes were differentiated into immature DCs (iDCs). In addition, Pan T cells were also isolated from healthy PBMC donors using a human Pan T cell Kit (Miltenyi Biotec) then seeded at 1×10⁶ cells/ml in 24-well plates in the presence of CD3/CD28 tetramers (Immunocult; Stemcell Technologies; 10991). Every two days, cells were washed, resuspended at 1×10⁶ cells/ml in 24-well plates with CD3/CD28 tetramers (Immunocult; Stemcell Technologies; 10991). After 7 days, cells were washed and rested for 24 hs; after which cells were co-cultured with autologous iDC in presence or absence of the V_{H} at concentrations in a 96 well culture plate. Lastly, a solution of SEB at 0.0001 μg/ml in culture media was added to the culture plate followed by a 72-hour incubation at 37° C. and 5% CO₂. The cell culture supernatant was then harvested and cryogenically stored (−180° C.) until further use for IFNγ quantification which was measured via HTRF (Homogenous time resolved Fluorescence assay) technology. The HTRF assay was performed using a human IFN γ kit (Cisbio Catalogue no. 62H1 FNGPEH). Thawed supernatant samples were diluted in culture media 10 times. For the standard, a 7-point standard curve of two-fold serial dilutions (4000-46.4 μg/ml) in culture media and then 16 μl of either supernatant or standard was added to a 384 well plate. This was followed by the addition of 4 μl of IFN γ antibodies mixture, consisting of a donor europium cryptate labelled antibody and an acceptor XL labelled antibody. The plate was incubated overnight at room temperature protected from light. Following the incubation, the plates were read using the Pherastar microplate plate reader (BMG lab tech) and the IFN γ levels determined according the manufacturer's instructions (FIG. 15).

### Example 12: In Vivo Efficacy Study

TABLE 27
MC38 tumour model in C57BL/6-Pdcd1^{tm1(PDCD1)}Tnfrsf9^{tm1(TNFRSF9)}
mice (Crown Bioscience Inc.). Experimental mice (n = 8
per group) were treated with PBS, 3 mg/kg Q2D TPP-1315 or 5
mg/kg Q3D Urelumab analog. Tumour growth was measured twice
weekly, and the average tumour volume ± SEM as shown.

| | Day | | | | | | | | | |
|---|---|---|---|---|---|---|---|---|---|---|
| | 0 | | 3 | | 6 | | 10 | | 13 | |
| Group | Mean | SEM | Mean | SEM | Mean | SEM | Mean | SEM | Mean | SEM |
| PBS | 79.0 | 5.4 | 165.5 | 23.3 | 384.6 | 52.1 | 920.6 | 187.2 | 1782.8 | 337.2 |
| TPP-1315 | 79.0 | 5.2 | 152.5 | 11.0 | 270.8 | 31.5 | 539.4 | 81.2 | 971.3 | 129.6 |
| 3 mg/kg | | | | | | | | | | |
| Urelumab | 79.0 | 5.2 | 178.6 | 18.0 | 301.7 | 36.5 | 549.2 | 111.5 | 835.9 | 176.3 |
| 5 mg/kg | | | | | | | | | | |

[0401] TPP-1315 is the same as TPP-1246 except that the HSA binding V_{H} (191-E02-2) has been replaced with another half life extending moiety. The in vivo efficacy study utilised double knock-in HuGEMM immunocompetent mice from Crown Bioscience, whose extracellular regions of mouse PD-1 and CD137 are humanised to human PD-1 (hPD-1) and human CD137 (hCD137). The mice were inoculated subcutaneously in the right rear flank with 1×10⁶ MC38 cells to generate tumours. Following inoculation, mouse health was monitored daily including behaviours such as mobility, food and water consumption, body weight, eye, and hair matting. Study group randomisation was performed using “Matched distribution” method (StudyDirector™ software, version 3.1.399.19) when the mean tumour volume was approximately 79 mm³. At randomisation, each mouse was allocated into a study group, and treatment was initiated immediately.

[0402] Mice were treated with vehicle only (PBS), 3 mg/kg of a surrogate TPP-1246 molecule that has an alternative albumin-binding domain (TPP-1315) or 5 mg/kg of an Urelumab analogue. Mice were dosed every second day (Q2D) with PBS or TPP-1315 or every third day (Q3D) with the Urelumab analog for a total of 9 doses. Following randomisation/treatment initiation, caliper measurements of each tumour were taken twice per week and tumour volumes determined using the formula V=(L×W×W)/2, where L is the longest tumour dimension, and W is the longest tumour dimension perpendicular to the L. The study was terminated once the PBS group's mean tumour volume exceeded 2000 mm³.

[0403] Before the above described study was undertaken the protocol was reviewed and approved by Crown Biosciences' Institutional Animal Care and Use Committee (IACUC) and the care and use of the animals was conducted in accordance with the regulations of the Association for Assessment and Accreditation of Laboratory Animal Care (AAALAC).

### Example 13 Pharmacokinetics Analysis of Single Intravenous Dose of Half-Life Extended Constructs in the Double Transgenic Humanised FcRn/HSA Mouse

[0404] Briefly, male or female GenOway Human HSA/FcRn Tg mice were dosed with a single intravenous injection of compounds, listed in the table no 4 (n=3) at either 1 or 2 mg/kg via tail vein. Some of the constructs contained purification/detection tag such as: polyhistidine or FLAG tag. Blood samples were collected at pre-dose and at 0.083 h, 1 h, 8 h, 24 h, 48 h, 72 h and 96 h post drug administration via the saphenous vein. At 168 h post dose all animals were euthanised and blood was collected. Plasma was separated and stored at −80° C. until an assay was carried out. Plasma samples were analysed on the Gyrolab immunoassay platform, using as capture human CD137 and either human CD137Dylight650, human PD-1 Dylight650 or anti-Flag-AF647 rabbit mAb (NEB, cat#15009S) as detection. Data was analysed using Gyros to obtain compound concentrations in plasma. Pharmacokinetic analysis of data was done using PK Solver 2.0, an Excel add on. Results of the study show that compounds have a half-life in the range of 20 to 52 hours when dosed at 2 mg/kg intravenously in human HSA/FcRn Tg mice.

TABLE 28
Summary table for pK parameters.

| | Dose | Cmax | Half-life |
|---|---|---|---|
| Number | (mg/kg) | [ug/ml] | [h] |
| TPP-1010 | 2 | 53.7 | 20.3 |
| TPP-1027 | 2 | 54.5 | 19.9 |
| TPP-1028 | 2 | 61.3 | 51.6 |

### Example 14 PK Study in Cynomolgus Monkey

[0405] Prior to initiating the cynomolgus monkey PK study a review of replacement, reduction, and refinement considerations, as well as ethical and scientific justification (e.g. target expression/homology versus human, dose levels, etc), and risks, was conducted both at Crescendo Biologics and the contract research organisation. The animal work in this cynomolgus monkey PK study was conducted under a UK Home Office Project License at a contract research organisation based in the UK. The Home Office license governing this study strictly specifies the limits of severity of effects on the animals. The procedures in the protocol did not cause any effects which exceeded the severity limit of the procedure.

[0406] Briefly, three male cynomolgus macaque were dosed with 4 mg/kg of Humabody construct listed in the table (TPP-1246), the study was carried out in Charles River Study. Serum samples were taken at Predose (−24 hrs), 1 hr, 2 hrs, 4 hrs, 8 hrs, 24 hrs, 48 hrs, 72 hrs, 120 hrs, 168 hrs, 216 hrs, 264 hrs, 312 hrs, 360 hrs, 408 hrs and 504 hrs post dose from all test subjects and frozen prior to testing. PK analysis was performed on the serum samples using assays developed at Crescendo.

[0407] The PK assay utilises the Gyrolab Xplore immunoassay platform using a sandwich immunoassay format; the analyte (listed in the table) is immobilized by biotinylated CD137 antigen and is detected by dyLight650 labelled PD-1. The assay was optimised and established to confirm range and reproducibility and the sample analysis was completed in accordance with the established assays. The PK analysis was performed on the PK data from the following timepoints: Animal 01: 1 to 168 hrs, Animal 02: 1 to 120 hrs and Animal 03: 1 to 168 hrs. The reported PK parameters are the mean from the 3 individuals for each result. The T1/2 of TPP-1246 in Cyno Serum has been demonstrated to be 84.5 hrs±7.58 hrs. Data is shown in FIG. 16.

TABLE 29
PK parameter estimates following a single intravenous
dose of TPP-1246 in cynomolgus macaque

| | Compound | Dose | Cmax | Half-life |
|---|---|---|---|---|
| TPP | description | (mg/kg) | [ug/ml] | [h] |
| TPP-1246 | CD137A-6GS-HSA2- | 4 | 100.6939 | 84.51278 |
| | 6GS-PD138G7(G109D) | | | |

The application's sequence listing, which the Patent Office published only in electronic form, follows.

SEQUENCE LISTING (1895 sequences)

SEQ ID NO: 1 - protein, 5 aa, Homo sapiens
SHWMT

SEQ ID NO: 2 - protein, 17 aa, Homo sapiens
HIKEDGSEKYYEDSVEG

SEQ ID NO: 3 - protein, 14 aa, Homo sapiens
GGDGYSDSHFGVDV

SEQ ID NO: 4 - protein, 123 aa, Homo sapiens
EVQLVESGGGLVQPGGSLRLSCAASGFTFSSHWMTWFRQAPGKGLEWVAHIKEDGSEKYYEDSVEGRFTVSRDNAKNSVYLQMNSLRAEDTAVYYCARGGDGYSDSHFGVDVWGQGTTVTVSS

SEQ ID NO: 5 - protein, 5 aa, Homo sapiens
SYWMT

SEQ ID NO: 6 - protein, 17 aa, Homo sapiens
HIKEDGSEKYYVDSVEG

SEQ ID NO: 7 - protein, 14 aa, Homo sapiens
GGDGYSDSHYGVDV

SEQ ID NO: 8 - protein, 123 aa, Homo sapiens
EVQLVESGGGLVQPGGSLRLSCAASGFTFSSYWMTWFRQAPGKGLEWVAHIKEDGSEKYYVDSVEGRFTISRDNANNSLYLQMNSLRAEDTAVYYCARGGDGYSDSHYGVDVWGQGTTVTVSS

SEQ ID NO: 9 - protein, 5 aa, Homo sapiens
SYWMT

SEQ ID NO: 10 - protein, 17 aa, Homo sapiens
NINQDGSEKYYVDSVEG

SEQ ID NO: 11 - protein, 14 aa, Homo sapiens
GGLGYGDSHYGMDV

SEQ ID NO: 12 - protein, 123 aa, Homo sapiens
EVQLVESGGGLVQPGGSLRLSCAASGFTFSSYWMTWFRQAPGRGLEWVANINQDGSEKYYVDSVEGRFTVSRDNAKNSLYLQMNSLRAEDTAVYYCARGGLGYGDSHYGMDVWGQGTTVTVSS

SEQ ID NO: 13 - protein, 5 aa, Homo sapiens
NYWMT

SEQ ID NO: 14 - protein, 17 aa, Homo sapiens
NINQDGSEKYYVDSVEG

SEQ ID NO: 15 - protein, 14 aa, Homo sapiens
GGLGYGDSHYGMDV

SEQ ID NO: 16 - protein, 123 aa, Homo sapiens
EVQLVESGGGLVQPGGSLRLSCAASGFTFSNYWMTWFRQAPGGGLEWVANINQDGSEKYYVDSVEGRFTVSRDNAKNSLYLQMNSLRAEDTAVYYCARGGLGYGDSHYGMDVWGQGTTVTVSS

SEQ ID NO: 17 - protein, 5 aa, Homo sapiens
NYWMI

SEQ ID NO: 18 - protein, 17 aa, Homo sapiens
NINQDGSEKYYVDSVEG

SEQ ID NO: 19 - protein, 14 aa, Homo sapiens
GGDGYSGSHHGTDV

SEQ ID NO: 20 - protein, 123 aa, Homo sapiens
EVQLVESGGGLVQPGGSLRLSCAASGFTFSNYWMIWFRQAPGKGLEWVANINQDGSEKYYVDSVEGRFTISRDNAKNSLYLQMNSLRAEDTAVYYCARGGDGYSGSHHGTDVWGQGTTVTVSS

SEQ ID NO: 21 - protein, 5 aa, Homo sapiens
SYWMS

SEQ ID NO: 22 - protein, 17 aa, Homo sapiens
NIKQDGSEKYYVDSVKG

SEQ ID NO: 23 - protein, 14 aa, Homo sapiens
GGEGYSTSHYGMDV

SEQ ID NO: 24 - protein, 123 aa, Homo sapiens
EVQLVESGGGLVQPGGSLRLSCAASGFTFSSYWMSWVRQAPGKGLEWVANIKQDGSEKYYVDSVKGRFTISRDNAKNSLYLQMNSLRAEDTAVYYCARGGEGYSTSHYGMDVWGQGTTVTVSS

SEQ ID NO: 25 - protein, 5 aa, Homo sapiens
SYWML

SEQ ID NO: 26 - protein, 17 aa, Homo sapiens
NINQDGSEKYYVDSVKG

SEQ ID NO: 27 - protein, 14 aa, Homo sapiens
GGDGYSDSHFGTDV

SEQ ID NO: 28 - protein, 123 aa, Homo sapiens
EVQLVESGGGLVQPGGSLRLSCGASGFTFSSYWMLWFRQAPGKGLEWVANINQDGSEKYYVDSVKGRFTISRDNAKNSLYLQMNTLRAEDTAIYYCARGGDGYSDSHFGTDVWGQGTTVTVSS

SEQ ID NO: 29 - protein, 5 aa, Homo sapiens
SYWMF

SEQ ID NO: 30 - protein, 17 aa, Homo sapiens
NINQDGSEKYYVDSVEG

SEQ ID NO: 31 - protein, 14 aa, Homo sapiens
GGDGYSDSHYGTDV

SEQ ID NO: 32 - protein, 123 aa, Homo sapiens
EVQLVESGGGLVQPGGSLRLSCGASGFTFSSYWMFWFRQAPGEGLEWVANINQDGSEKYYVDSVEGRFTISRDNAKNSLYLQMNSLRAEDTAIYYCARGGDGYSDSHYGTDVWGQGTTVTVSS

SEQ ID NO: 33 - protein, 5 aa, Homo sapiens
NYWMT

SEQ ID NO: 34 - protein, 17 aa, Homo sapiens
NINQDGSEKYYVDSVEG

SEQ ID NO: 35 - protein, 14 aa, Homo sapiens
GGLGYGDSHYGMDV

SEQ ID NO: 36 - protein, 123 aa, Homo sapiens
EVQLVESGGGLVQPGGSLRLSCAASGFTFSNYWMTWFRQAPGGGLEWVANINQDGSEKYYVDSVEGRFTVSRDNAKNSLDLQMNSLRAEDTAVYYCARGGLGYGDSHYGMDVWGQGTTVTVSS

SEQ ID NO: 37 - protein, 5 aa, Homo sapiens
DYWMN

SEQ ID NO: 38 - protein, 17 aa, Homo sapiens
NIKEDGSEKYYVDSVEG

SEQ ID NO: 39 - protein, 14 aa, Homo sapiens
GGAGYSMSHYGMDV

SEQ ID NO: 40 - protein, 123 aa, Homo sapiens
EVQLVESGGGLVQPGGSLRLSCAASGFTFSDYWMNWARQAPGKGLEWVANIKEDGSEKYYVDSVEGRFTISRDNAKNSTYLQMNSLRVEDTAVYYCARGGAGYSMSHYGMDVWGQGTTVTVSS

SEQ ID NO: 41 - protein, 5 aa, Homo sapiens
DYWMN

SEQ ID NO: 42 - protein, 17 aa, Homo sapiens
NIKEDGSEKYYVDSVEG

SEQ ID NO: 43 - protein, 14 aa, Homo sapiens
GGAGYSMSHYGMDV

SEQ ID NO: 44 - protein, 123 aa, Homo sapiens
EVQLVESGGGLVQPGGSLRLSCEASGFTFSDYWMNWARQAPGKGLEWVANIKEDGSEKYYVDSVEGRFTISRDNAKNSTYLQMNSLRAEDTAVYYCARGGAGYSMSHYGMDVWGQGTTVTVSS

SEQ ID NO: 45 - protein, 5 aa, Homo sapiens
SYWML

SEQ ID NO: 46 - protein, 17 aa, Homo sapiens
NINQDGSEKYYVDSVKG

SEQ ID NO: 47 - protein, 14 aa, Homo sapiens
GGDGYSNSHFGTDV

SEQ ID NO: 48 - protein, 123 aa, Homo sapiens
EVQLVESGGGLVQPGGSLRLSCGASGFTFSSYWMLWFRQAPGKGLEWVANINQDGSEKYYVDSVKGRFTISRDNAKNSLYLQMNTLRAEDTAIYYCARGGDGYSNSHFGTDVWGQGTTVTVSS

SEQ ID NO: 49 - protein, 5 aa, Homo sapiens
SYWMF

SEQ ID NO: 50 - protein, 17 aa, Homo sapiens
NINQDGSEKYYVDSVEG

SEQ ID NO: 51 - protein, 14 aa, Homo sapiens
GGDGYSDSHYGTDV

SEQ ID NO: 52 - protein, 123 aa, Homo sapiens
EVQLVESGGGLVKPGGSLRLSCGASGFTFSSYWMFWFRQAPGEGLEWVANINQDGSEKYYVDSVEGRFTISRDNAKNSLYLQMNSLRAEDTAIYYCARGGDGYSDSHYGTDVWGQGTTVTVSS

SEQ ID NO: 53 - protein, 5 aa, Homo sapiens
NYWMN

SEQ ID NO: 54 - protein, 17 aa, Homo sapiens
NIKEDGSENYYVDSVKG

SEQ ID NO: 55 - protein, 14 aa, Homo sapiens
GGEGYSTSHYGMDV

SEQ ID NO: 56 - protein, 123 aa, Homo sapiens
EVQLVESGGGLVQPGGSLRLSCAASGFTFSNYWMNWVRQAPGKGLEWVANIKEDGSENYYVDSVKGRFTISRDNAKNSLYLQMNSLRAEDTAVYYCARGGEGYSTSHYGMDVWGQGTTVTVSS

SEQ ID NO: 57 - protein, 5 aa, Homo sapiens
TYWML

SEQ ID NO: 58 - protein, 17 aa, Homo sapiens
NINQDGSEKYYVDSVKG

SEQ ID NO: 59 - protein, 14 aa, Homo sapiens
GGDGYSDSHFGTDV

SEQ ID NO: 60 - protein, 123 aa, Homo sapiens
EVQLVESGGGLVQPGGSLRLSCGASGFTFSTYWMLWFRQAPGKGLEWVANINQDGSEKYYVDSVKGRFTISRDNAKNSLSLQMNSLRAEDTATYYCARGGDGYSDSHFGTDVWGQGTTVTVSS

SEQ ID NO: 61 - protein, 5 aa, Homo sapiens
NYWMM

SEQ ID NO: 62 - protein, 17 aa, Homo sapiens
NINQDGSEKYFVDSVEG

SEQ ID NO: 63 - protein, 14 aa, Homo sapiens
GGDGYSSSHYGTDV

SEQ ID NO: 64 - protein, 123 aa, Homo sapiens
EVQLVESGGGLVQPGGSLRLSCVASGFTFSNYWMMWFRQAPGKGLEWVANINQDGSEKYFVDSVEGRFTISRDNAKNSLYLQMNSLRAEDTAVYYCARGGDGYSSSHYGTDVWGQGTTVTVSS

SEQ ID NO: 65 - protein, 5 aa, Homo sapiens
SYWMN

SEQ ID NO: 66 - protein, 17 aa, Homo sapiens
NIKEDGSEKYYVDSVKG

SEQ ID NO: 67 - protein, 14 aa, Homo sapiens
GGDSYGYRDYGMDV

SEQ ID NO: 68 - protein, 123 aa, Homo sapiens
EVQLVESGGGLVQPGGSLRLSCAASGFTFSSYWMNWVRQAPGKGLEWVANIKEDGSEKYYVDSVKGRFTISRDNAKNSLYLQMNSLRAEDTAVYYCARGGDSYGYRDYGMDVWGQGTTVTVSS

SEQ ID NO: 69 - protein, 5 aa, Homo sapiens
THWMN

SEQ ID NO: 70 - protein, 17 aa, Homo sapiens
NINQDGSEKYYVDSVEG

SEQ ID NO: 71 - protein, 14 aa, Homo sapiens
GGVGYGDSHFGMDV

SEQ ID NO: 72 - protein, 123 aa, Homo sapiens
EVQLVESGGGLVQPGGSLRLSCAASGFTFSTHWMNWARQAPGKELEWVANINQDGSEKYYVDSVEGRFTISRDNANNSLYLQMNSLRAEDTAVYYCARGGVGYGDSHFGMDVWGLGTTVTVSS

SEQ ID NO: 73 - protein, 5 aa, Homo sapiens
SYWMI

SEQ ID NO: 74 - protein, 17 aa, Homo sapiens
NINQDGSEKYYVDSVKG

SEQ ID NO: 75 - protein, 14 aa, Homo sapiens
GGDDYSNSHYGMDV

SEQ ID NO: 76 - protein, 123 aa, Homo sapiens
EVQLVESGGGLVQPGGSLRLSCAASGFTFSSYWMIWVRQAPGKGLEWVANINQDGSEKYYVDSVKGRFTISRDNAKNSLYLQMNSLRAEDTAVYYCARGGDDYSNSHYGMDVSGQGTTVTVSS

SEQ ID NO: 77 - protein, 5 aa, Homo sapiens
SYWMN

SEQ ID NO: 78 - protein, 17 aa, Homo sapiens
NINQDGSEKYYVDSVQG

SEQ ID NO: 79 - protein, 14 aa, Homo sapiens
GGFGYGDSHYGMDV

SEQ ID NO: 80 - protein, 123 aa, Homo sapiens
EVQLVESGGGLVQPGGSLRLSCAASGFTFSSYWMNWVRQAPGKGLEWVANINQDGSEKYYVDSVQGRFTISRDNANNSLYLQMNSLRAEDTAVYYCARGGFGYGDSHYGMDVWGQGTTVTVSS

SEQ ID NO: 81 - protein, 5 aa, Homo sapiens
SYWMF

SEQ ID NO: 82 - protein, 17 aa, Homo sapiens
NVNQDGSEKYYVDSVEG

SEQ ID NO: 83 - protein, 14 aa, Homo sapiens
GGEGYSDSHYGTDV

SEQ ID NO: 84 - protein, 123 aa, Homo sapiens
EVQLVESGGGLVQPGGSLRLSCGASGFTFSSYWMFWFRQAPGKELEWVANVNQDGSEKYYVDSVEGRFTISRDNAKNSLYLQMNSLRAEDTAIYYCARGGEGYSDSHYGTDVWGQGTTVTVSS

SEQ ID NO: 85 - protein, 5 aa, Homo sapiens
NYWMN

SEQ ID NO: 86 - protein, 17 aa, Homo sapiens
NIKEDGSEKYYVDSVEG

SEQ ID NO: 87 - protein, 14 aa, Homo sapiens
GGEGYGDSHYGMDV

SEQ ID NO: 88 - protein, 123 aa, Homo sapiens
QVQLVESGGGLVQPGGSLRLSCAASGFTFSNYWMNWVRQAPGKGLEWVANIKEDGSEKYYVDSVEGRFTISRDNARNSLYLQMNSLRAEDTAVYYCARGGEGYGDSHYGMDVSGQGTTVTVSS

SEQ ID NO: 89 - protein, 5 aa, Homo sapiens
SYWMN

SEQ ID NO: 90 - protein, 17 aa, Homo sapiens
NIKQDGSEKYYVDSVKG

SEQ ID NO: 91 - protein, 14 aa, Homo sapiens
GGEGYGDDHYGMDV

SEQ ID NO: 92 - protein, 123 aa, Homo sapiens
QVQLVESGGGLVQPGGSLRLSCAASGFTFSSYWMNWVRQAPGKGLEWVANIKQDGSEKYYVDSVKGRFTISRDNAKNSLYLQMNSLTAEDTAVYYCARGGEGYGDDHYGMDVWGQGTTVTVSS

SEQ ID NO: 93 - protein, 5 aa, Homo sapiens
SYWMS

SEQ ID NO: 94 - protein, 17 aa, Homo sapiens
NIKQDGSEKYYVDSVKG

SEQ ID NO: 95 - protein, 14 aa, Homo sapiens
GGEGYGDYHYGLDV

SEQ ID NO: 96 - protein, 123 aa, Homo sapiens
QVQLVESGGGLVQPGGSLRLSCAASGFTFSSYWMSWVRQAPGKGLEWVANIKQDGSEKYYVDSVKGRFTISRDNAKNSLYLQMNSLRAEDTAVYYCARGGEGYGDYHYGLDVSGQGTTVTVSS

SEQ ID NO: 97 - protein, 5 aa, Homo sapiens
SYWMN

SEQ ID NO: 98 - protein, 17 aa, Homo sapiens
NIKQDGSEKYYVDSVKG

SEQ ID NO: 99 - protein, 14 aa, Homo sapiens
GGDSYGYRDYGMDV

SEQ ID NO: 100 - protein, 123 aa, Homo sapiens
EVQLVESGGGLVQPGGSLRLSCAASGFTFSSYWMNWVRQAPGKGLEWVANIKQDGSEKYYVDSVKGRFTISRDNAKNSLYLQMNSLRAEDTAVYYCARGGDSYGYRDYGMDVWGQGTTVTVSS

SEQ ID NO: 101 - protein, 5 aa, Homo sapiens
THWMN

SEQ ID NO: 102 - protein, 17 aa, Homo sapiens
NINQDGSEKYYVDSVEG

SEQ ID NO: 103 - protein, 14 aa, Homo sapiens
GGVGYGDSHFGMDV

SEQ ID NO: 104 - protein, 123 aa, Homo sapiens
EVQLVESGGGLVQPGGSLRLSCVASGFTFSTHWMNWARQAPGKELEWVANINQDGSEKYYVDSVEGRFTISRDNANNSLYLQMNSLRAEDTAVYYCARGGVGYGDSHFGMDVWGLGTTVTVSS

SEQ ID NO: 105 - protein, 5 aa, Homo sapiens
SYWML

SEQ ID NO: 106 - protein, 17 aa, Homo sapiens
NINQDGSEKYYVDSVEG

SEQ ID NO: 107 - protein, 14 aa, Homo sapiens
GGEGYSDSHHGTDV

SEQ ID NO: 108 - protein, 123 aa, Homo sapiens
EVQLVESGGGLVQPGGSLRLSCGASGFTFSSYWMLWFRQAPGEGLEWVANINQDGSEKYYVDSVEGRLTISRDNAKNALYLQMNSLRAEDTAIYYCARGGEGYSDSHHGTDVWGQGTTVTVSS

SEQ ID NO: 109 - protein, 5 aa, Homo sapiens
NYWMN

SEQ ID NO: 110 - protein, 17 aa, Homo sapiens
NIKQDGSEKYYVDSVKG

SEQ ID NO: 111 - protein, 14 aa, Homo sapiens
GGDNYAYRDFGMDV

SEQ ID NO: 112 - protein, 123 aa, Homo sapiens
EVQLVESGGGLVQPGGSLRLSCAASGFTFSNYWMNWVRQAPGKGLEWVANIKQDGSEKYYVDSVKGRFTISRDNAKNSLYLQMNSLRAEDTAVYYCARGGDNYAYRDFGMDVWGQGTTVTVSS

SEQ ID NO: 113 - protein, 5 aa, Homo sapiens
NYWMF

SEQ ID NO: 114 - protein, 17 aa, Homo sapiens
NVNQDGSEKYYVDSVEG

SEQ ID NO: 115 - protein, 14 aa, Homo sapiens
GGEGYSDSHYGTDV

SEQ ID NO: 116 - protein, 123 aa, Homo sapiens
EVQLVESGGGLVQPGGSLRLSCGASGFTFSNYWMFWFRQAPGKELEWVANVNQDGSEKYYVDSVEGRFTISRDNAKNSLYLQMNSLRAEDTAIYYCARGGEGYSDSHYGTDVWGQGTTVTVSS

SEQ ID NO: 117 - protein, 5 aa, Homo sapiens
SYWMN

SEQ ID NO: 118 - protein, 17 aa, Homo sapiens
NINQDGSEKYYVDSVKG

SEQ ID NO: 119 - protein, 14 aa, Homo sapiens
GGEEYGSSHYGMDV

SEQ ID NO: 120 - protein, 123 aa, Homo sapiens
EVQLVESGGGLVQPGGSLRLSCAASGFTFSSYWMNWVRQAPGKGLEWVANINQDGSEKYYVDSVKGRFTISRDNAKNSLYLQMNSLRAEDTAVYYCARGGEEYGSSHYGMDVWGLGTTVTVSS

SEQ ID NO: 121 - protein, 5 aa, Homo sapiens
SYWMN

SEQ ID NO: 122 - protein, 17 aa, Homo sapiens
NINQDGSEKYYVDSVKG

SEQ ID NO: 123 - protein, 14 aa, Homo sapiens
GGDSYGYRDYGMDV

SEQ ID NO: 124 - protein, 123 aa, Homo sapiens
EVQLVESGGGLVQPGGSLRLSCAASGFTFSSYWMNWVRQAPGKGLEWVANINQDGSEKYYVDSVKGRFTISRDNAKNSLYLQMNSLRAEDTAVYYCARGGDSYGYRDYGMDVWGQGTTVTVSS

SEQ ID NO: 125 - protein, 5 aa, Homo sapiens
SYWMN

SEQ ID NO: 126 - protein, 17 aa, Homo sapiens
NINQNGSEKYYVDSVEG

SEQ ID NO: 127 - protein, 14 aa, Homo sapiens
GGFGYGDSHYGMDV

SEQ ID NO: 128 - protein, 123 aa, Homo sapiens
EVQLVESGGGLVQPGGSLRLSCAASGFTFSSYWMNWVRQTPGKGLEWVANINQNGSEKYYVDSVEGRFNISRDNAKNSLYLQMSSLRAEDTAVYYCARGGFGYGDSHYGMDVWGQGTTVTVSS

SEQ ID NO: 129 - protein, 5 aa, Homo sapiens
NYWMT

SEQ ID NO: 130 - protein, 17 aa, Homo sapiens
NINQDESEEYYVDSVKG

SEQ ID NO: 131 - protein, 14 aa, Homo sapiens
GGDGYSDSHYGTDV

SEQ ID NO: 132 - protein, 123 aa, Homo sapiens
EVQLVESGGGLVQAGGSLRLSCVASGFTFSNYWMTWFRQAPGKGLEWVANINQDESEEYYVDSVKGRFTISRDNAKNSLFLQMNSLRAEDTAIYYCARGGDGYSDSHYGTDVWGQGTTVTVSS

SEQ ID NO: 133 - protein, 5 aa, Homo sapiens
NYWMN

SEQ ID NO: 134 - protein, 17 aa, Homo sapiens
NIKEDGSENYYVDSVKG

SEQ ID NO: 135 - protein, 14 aa, Homo sapiens
GGEGYSTSHYGMDV

SEQ ID NO: 136 - protein, 123 aa, Homo sapiens
QVQLQESGGGLVQPGGSLRLSCTASGFTFSNYWMNWVRQAPGKGLEWVANIKEDGSENYYVDSVKGRFTISRDNAKNSLYLQMNSLRAEDTAVYYCARGGEGYSTSHYGMDVWGQGTTVTVSS

SEQ ID NO: 137 - protein, 5 aa, Homo sapiens
NYWMN

SEQ ID NO: 138 - protein, 17 aa, Homo sapiens
NIKQDGSEKYYVDSVEG

SEQ ID NO: 139 - protein, 14 aa, Homo sapiens
GGEGYGESHYGMDV

SEQ ID NO: 140 - protein, 123 aa, Homo sapiens
QVQLVESGGGLVQPGGSLRLSCAASGFTFSNYWMNWVRQAPGKGLEWVANIKQDGSEKYYVDSVEGRFTISRDNAKNSLYLQMDSLRAEDTAVYYCARGGEGYGESHYGMDVSGQGTTVTVSS

SEQ ID NO: 141 - protein, 5 aa, Homo sapiens
TYWMN

SEQ ID NO: 142 - protein, 17 aa, Homo sapiens
NIKQDGSEKYYVDSVKG

SEQ ID NO: 143 - protein, 14 aa, Homo sapiens
GGDSYGYRDYGMDV

SEQ ID NO: 144 - protein, 123 aa, Homo sapiens
EVQLVESGGGLVQPGGSLRLSCAASGFTFSTYWMNWVRQAPGKGLEWVANIKQDGSEKYYVDSVKGRFTISRDNAKNSLYLQMNSLRAEDTAVYYCARGGDSYGYRDYGMDVWGQGTTVTVSS

SEQ ID NO: 145 - protein, 5 aa, Homo sapiens
YYWMI

SEQ ID NO: 146 - protein, 17 aa, Homo sapiens
NINQDGSEKYYVDSVKG

SEQ ID NO: 147 - protein, 14 aa, Homo sapiens
GGDGYSNSHFGMDV

SEQ ID NO: 148 - protein, 123 aa, Homo sapiens
EVQLVESGGGLVQPGGSLRLSCAASGFTFSYYWMIWFRQAPGEELEWVANINQDGSEKYYVDSVKGRFIISRDNATNSLFLQMNSLRAEDTAVYYCARGGDGYSNSHFGMDVWGQGTTVTVSS

SEQ ID NO: 149 - protein, 5 aa, Homo sapiens
NYWMI

SEQ ID NO: 150 - protein, 17 aa, Homo sapiens
NINQDGSEKYYVDSVKG

SEQ ID NO: 151 - protein, 14 aa, Homo sapiens
GGEGYSDSHYGTDV

SEQ ID NO: 152 - protein, 123 aa, Homo sapiens
EVQLVESGGGLVQPGGSLRLSCAASGFTFSNYWMIWYRQAPGEELEWVANINQDGSEKYYVDSVKGRFTISRDNAKNSLYLQMNSLRAEDTAIYYCARGGEGYSDSHYGTDVWGQGTTVTVSS

SEQ ID NO: 153 - protein, 5 aa, Homo sapiens
NYWMN

SEQ ID NO: 154 - protein, 17 aa, Homo sapiens
NINQDESEKYYVDSVKG

SEQ ID NO: 155 - protein, 14 aa, Homo sapiens
GGFGYGDSHFGMDV

SEQ ID NO: 156 - protein, 123 aa, Homo sapiens
EVQLVESGGGLVQPGGSLRLSCAASGFTFSNYWMNWVRQAPGKELEWVANINQDESEKYYVDSVKGRFTVSRDNAKNSLFLQMNSLRADDTAVYYCARGGFGYGDSHFGMDVWGQGTTVTVSS

SEQ ID NO: 157 - protein, 5 aa, Homo sapiens
NYWMF

SEQ ID NO: 158 - protein, 17 aa, Homo sapiens
NVNQDGSEKYYVDSVEG

SEQ ID NO: 159 - protein, 14 aa, Homo sapiens
GGEGYSDSHYGTDV

SEQ ID NO: 160 - protein, 123 aa, Homo sapiens
EVQLVESGGGLVQPGGSLRLSCGASGFTFSNYWMFWFRQAPGKELEWVANVNQDGSEKYYVDSVEGRFTISRDDAKNSLYLQMNSLRAEDTAIYYCARGGEGYSDSHYGTDVWGQGTTVTVSS

SEQ ID NO: 161 - protein, 5 aa, Homo sapiens
NYWMF

SEQ ID NO: 162 - protein, 17 aa, Homo sapiens
NVNQNGSEKYYVDSVEG

SEQ ID NO: 163 - protein, 14 aa, Homo sapiens
GGEGYSDSHYGTDV

SEQ ID NO: 164 - protein, 123 aa, Homo sapiens
EVQLVESGGGLVQPGGSLRLSCGASGFTFSNYWMFWFRQAPGKELEWVANVNQNGSEKYYVDSVEGRFTISRDNAKNSLYLQMNSLRAEDTAIYYCARGGEGYSDSHYGTDVWGQGTTVTVSS

SEQ ID NO: 165 - protein, 5 aa, Homo sapiens
NYWMN

SEQ ID NO: 166 - protein, 17 aa, Homo sapiens
NIKQDGSEKYYVDSVKG

SEQ ID NO: 167 - protein, 14 aa, Homo sapiens
GGEGYGDSHYGMDV

SEQ ID NO: 168 - protein, 123 aa, Homo sapiens
QVQLVESGGGLVQPGGSLRLSCAASGFTFSNYWMNWVRQAPGKGLEWVANIKQDGSEKYYVDSVKGRFTISRDNAKDSLYLQMNSLRAEDTAIYYCARGGEGYGDSHYGMDVSGQGTTVTVSS

SEQ ID NO: 169 - protein, 5 aa, Homo sapiens
NYWMI

SEQ ID NO: 170 - protein, 17 aa, Homo sapiens
NINQDGSEKYYVDSVKG

SEQ ID NO: 171 - protein, 14 aa, Homo sapiens
GGDGYSNSHYGMDV

SEQ ID NO: 172 - protein, 123 aa, Homo sapiens
EVQLVESGGGLVQPGGSLRLSCAASGFTFSNYWMIWYRQAPGEELEWVANINQDGSEKYYVDSVKGRFTISRDNATNSLFLQMNSLRAEDTAVYYCARGGDGYSNSHYGMDVWGQGTTVTVSS

SEQ ID NO: 173 - protein, 5 aa, Homo sapiens
DYWMI

SEQ ID NO: 174 - protein, 17 aa, Homo sapiens
NINQDGSEKYYVDSVKG

SEQ ID NO: 175 - protein, 14 aa, Homo sapiens
GGDGYSNSHYGMDV

SEQ ID NO: 176 - protein, 123 aa, Homo sapiens
EVQLVESGGGLVQPGGSLRLSCAASGFTFSDYWMIWYRQAPGEELEWVANINQDGSEKYYVDSVKGRFTISRDNATNSLFLQMNSLRAEDTAVYYCARGGDGYSNSHYGMDVWGQGTTVTVSS

SEQ ID NO: 177 - protein, 5 aa, Homo sapiens
KYWMI

SEQ ID NO: 178 - protein, 17 aa, Homo sapiens
NINQDGSEKYYVDSVEG

SEQ ID NO: 179 - protein, 14 aa, Homo sapiens
GGDDYSNSHYGMDV

SEQ ID NO: 180 - protein, 123 aa, Homo sapiens
EVQLVESGGGLVQPGGSLRLSCAASGFTFSKYWMIWVRQAPEKGLEWVANINQDGSEKYYVDSVEGRFTISRDNVNNSLYLQMNSLRAEDTAVYYCARGGDDYSNSHYGMDVSGQGTTVTVSS

SEQ ID NO: 181 - protein, 5 aa, Homo sapiens
NYWMS

SEQ ID NO: 182 - protein, 17 aa, Homo sapiens
NINQDGSEKYYVDSVKG

SEQ ID NO: 183 - protein, 14 aa, Homo sapiens
GGEEYSSSHYGMDV

SEQ ID NO: 184 - protein, 123 aa, Homo sapiens
EVQLVESGGGLVQPGGSLRLSCAASGFTFSNYWMSWVRQAPGRGLEWVANINQDGSEKYYVDSVKGRFTISRDNAKSSLYLQMNSLRAEDTAVYYCARGGEEYSSSHYGMDVWGQGTTVTVSS

SEQ ID NO: 185 - protein, 5 aa, Homo sapiens
NYWMN

SEQ ID NO: 186 - protein, 17 aa, Homo sapiens
NIKQDGSENYYVDSVKG

SEQ ID NO: 187 - protein, 14 aa, Homo sapiens
GGEGYSTSHYGMDV

SEQ ID NO: 188 - protein, 123 aa, Homo sapiens
EVQLVESGGGLVQPGGSLRLSCIASGFSFSNYWMNWVRQAPGKGLEWVANIKQDGSENYYVDSVKGRFTISRDNAKNSLYLQMNSLRAEDTAVYYCARGGEGYSTSHYGMDVWGQGTAVTVSS

SEQ ID NO: 189 - protein, 5 aa, Homo sapiens
SYWMS

SEQ ID NO: 190 - protein, 17 aa, Homo sapiens
NIKQDGSEKYYVDSVKG

SEQ ID NO: 191 - protein, 14 aa, Homo sapiens
GGEGYGVDHYGLDV

SEQ ID NO: 192 - protein, 123 aa, Homo sapiens
QVQLVESGGGLVQPGGSLRLSCAASGFTFSSYWMSWVRQAPGKGLEWVANIKQDGSEKYYVDSVKGRFTISRDNAKNSLYLQMSSLRAEDTAVYFCARGGEGYGVDHYGLDVSGQGTTVTVSS

SEQ ID NO: 193 - protein, 5 aa, Homo sapiens
SYWML

SEQ ID NO: 194 - protein, 17 aa, Homo sapiens
NVNQDGSENYYVDSVEG

SEQ ID NO: 195 - protein, 14 aa, Homo sapiens
GGEDYGNSHFGMDV

SEQ ID NO: 196 - protein, 123 aa, Homo sapiens
EVQLVESGGGLVQPGGSLRLSCGASGFTFSSYWMLWFRQAPGKELEWVANVNQDGSENYYVDSVEGRFTISRDNAKNSLYLQMHSLRAEDTAVYYCARGGEDYGNSHFGMDVWGQGTMVTVSS

SEQ ID NO: 197 - protein, 5 aa, Homo sapiens
NYWMI

SEQ ID NO: 198 - protein, 17 aa, Homo sapiens
NINQDGSEKYYVDSVKG

SEQ ID NO: 199 - protein, 14 aa, Homo sapiens
GGDGYSNSHYGMDV

SEQ ID NO: 200 - protein, 123 aa, Homo sapiens
EVQLVESGGGLVQPGRSLRLSCAASGFTFSNYWMIWYRQAPGEELEWVANINQDGSEKYYVDSVKGRFTISRDNATNSLFLQMNSLRAEDTAVYYCARGGDGYSNSHYGMDVWGQGTTVTVSS

SEQ ID NO: 201 - protein, 5 aa, Homo sapiens
NYWMI

SEQ ID NO: 202 - protein, 17 aa, Homo sapiens
NINQDGSEKYYVDSVKG

SEQ ID NO: 203 - protein, 14 aa, Homo sapiens
GGDGYSNSHYGMDV

SEQ ID NO: 204 - protein, 123 aa, Homo sapiens
EVQLVESGGGLVKPGGSLRLSCAASGFTFSNYWMIWYRQAPGEELEWVANINQDGSEKYYVDSVKGRFTISRDNATNSLFLQMNSLRAEDTAVYYCARGGDGYSNSHYGMDVWGQGTTVTVSS

SEQ ID NO: 205 - protein, 5 aa, Homo sapiens
KYWMI

SEQ ID NO: 206 - protein, 17 aa, Homo sapiens
NINQDGSEKYYVDSVEG

SEQ ID NO: 207 - protein, 14 aa, Homo sapiens
GGDDYSISHFGMDV

SEQ ID NO: 208 - protein, 123 aa, Homo sapiens
EVQLVESGGGLVQIGGSLRLSCAASGFTFSKYWMIWVRQAPEKGLEWVANINQDGSEKYYVDSVEGRFTISRDNANNSLFLQMNSLRAEDTAVYYCARGGDDYSISHFGMDVSGQGTRVTVSS

SEQ ID NO: 209 - protein, 5 aa, Homo sapiens
KYWMI

SEQ ID NO: 210 - protein, 17 aa, Homo sapiens
NINQDGSEKYYVDSVEG

SEQ ID NO: 211 - protein, 14 aa, Homo sapiens
GGDDYSHSHYGMDV

SEQ ID NO: 212 - protein, 123 aa, Homo sapiens
EVQLVESGGGLVQIGGSLRLSCVASGFTFSKYWMIWVRQAPEKGLEWVANINQDGSEKYYVDSVEGRFTISRDNANNSLYLQMNSLRAEDTAVYYCARGGDDYSHSHYGMDVSGQGTTVTVSS

SEQ ID NO: 213 - protein, 5 aa, Homo sapiens
NYWMN

SEQ ID NO: 214 - protein, 17 aa, Homo sapiens
NINQDGSEKYYVDSVKG

SEQ ID NO: 215 - protein, 14 aa, Homo sapiens
GGFGYGDSHYGMDV

SEQ ID NO: 216 - protein, 123 aa, Homo sapiens
EVQLVESGGGLVQPGGSLRLSCAASGFNFSNYWMNWVRQAPGKELEWVANINQDGSEKYYVDSVKGRFTISRDNAKNSLFLQMNSLRADDTAVYYCARGGFGYGDSHYGMDVWGQGTTVTVSS

SEQ ID NO: 217 - protein, 5 aa, Homo sapiens
SYWLN

SEQ ID NO: 218 - protein, 17 aa, Homo sapiens
NINQDGSENYYVDSVEG

SEQ ID NO: 219 - protein, 14 aa, Homo sapiens
GGEDYGNSHFGMDV

SEQ ID NO: 220 - protein, 123 aa, Homo sapiens
EVQLVESGGGLVQPGGSLRLSCAASGFTFGSYWLNWVRQAPGKGLEWVANINQDGSENYYVDSVEGRFTISRDNAKNSLYLQMHSLRAEDTAVYYCARGGEDYGNSHFGMDVWGQGTMVTVSS

SEQ ID NO: 221 - protein, 5 aa, Homo sapiens
SYWMS

SEQ ID NO: 222 - protein, 17 aa, Homo sapiens
NIKQDGSEKYYVDSVKG

SEQ ID NO: 223 - protein, 14 aa, Homo sapiens
GGEGYGVDHYGLDV

SEQ ID NO: 224 - protein, 123 aa, Homo sapiens
QVQLVESGGGLVKPGGSLRLSCAASGFTFSSYWMSWVRQAPGKGLEWVANIKQDGSEKYYVDSVKGRFTISRDNAKNSLYLQMSSLRAEDTAVYFCARGGEGYGVDHYGLDVSGQGTTVTVSS

SEQ ID NO: 225 - protein, 5 aa, Homo sapiens
DYWMN

SEQ ID NO: 226 - protein, 17 aa, Homo sapiens
NIKEDGSEKYYVDSVEG

SEQ ID NO: 227 - protein, 14 aa, Homo sapiens
GGEGYGDNHYGMDV

SEQ ID NO: 228 - protein, 123 aa, Homo sapiens
QVQLVESGGGLVQPGGSLRLSCTASGFTFSDYWMNWVRQAPGKGLEWVANIKEDGSEKYYVDSVEGRFTISRDNARNSLYLQMTSLREEDTAMYYCARGGEGYGDNHYGMDVSGQGTTVTVSS

SEQ ID NO: 229 - protein, 5 aa, Homo sapiens
SYWMN

SEQ ID NO: 230 - protein, 17 aa, Homo sapiens
NINQDGSEKYYVDSVEG

SEQ ID NO: 231 - protein, 14 aa, Homo sapiens
GGPDYGDLHYGMDV

SEQ ID NO: 232 - protein, 123 aa, Homo sapiens
EVQLVESGGGLVQPGGSLRLSCAASGFTFRSYWMNWVRQAPGKEAEWVANINQDGSEKYYVDSVEGRFTISRDNAKNSLFLQMNSLRDEDTAVYYCARGGPDYGDLHYGMDVWGQGTTVTVSS

SEQ ID NO: 233 - protein, 5 aa, Homo sapiens
RYWMS

SEQ ID NO: 234 - protein, 17 aa, Homo sapiens
NINQDGREKYYVDSVKG

SEQ ID NO: 235 - protein, 14 aa, Homo sapiens
GGEGYGDYHYGMDV

SEQ ID NO: 236 - protein, 123 aa, Homo sapiens
QVQLVESGGGLVQPGGSLRLSCAASGFTFSRYWMSWVRQAPGKGLERVANINQDGREKYYVDSVKGRFTISRDNAKNSLYLQMNSLRAEDTAVYYCARGGEGYGDYHYGMDVSGQGTTVTVSS

SEQ ID NO: 237 - protein, 5 aa, Homo sapiens
NYWMI

SEQ ID NO: 238 - protein, 17 aa, Homo sapiens
NINQDGSEKYYVDSVKG

SEQ ID NO: 239 - protein, 14 aa, Homo sapiens
GGDGYSNSHYGMDV

SEQ ID NO: 240 - protein, 123 aa, Homo sapiens
EVQLVESGGGLVQPGGSPRLSCAASGFTLSNYWMIWYRQAPGEKLEWVANINQDGSEKYYVDSVKGRFTISRDNATNSLFLQMNSLRAEDTAVYYCARGGDGYSNSHYGMDVWGQGTTVTVSS

SEQ ID NO: 241 - protein, 5 aa, Homo sapiens
NYWMN

SEQ ID NO: 242 - protein, 17 aa, Homo sapiens
NINQDESEKYYVDSVKG

SEQ ID NO: 243 - protein, 14 aa, Homo sapiens
GGFGYGDSHFGMDV

SEQ ID NO: 244 - protein, 123 aa, Homo sapiens
EVQLVESGGGLVQPGGSLRLSCVASGFNFSNYWMNWVRQAPGKELEWVANINQDESEKYYVDSVKGRFTISRDNAKNSLFLQMNSLRADDTAVYYCARGGFGYGDSHFGMDVWGQGTTVTVSS

SEQ ID NO: 245 - protein, 5 aa, Homo sapiens
NYWMN

SEQ ID NO: 246 - protein, 17 aa, Homo sapiens
NINQDESEKYYVDSVKG

SEQ ID NO: 247 - protein, 14 aa, Homo sapiens
GGFGYGDSHFGMDV

SEQ ID NO: 248 - protein, 123 aa, Homo sapiens
EVQLVESGGGLVQPGGSLRLSCAASGFNFSNYWMNWVRQAPGKELEWVANINQDESEKYYVDSVKGRFTIFRDNAKNSLFLQMNSLRADDTAVYYCARGGFGYGDSHFGMDVWGQGTTVTVSS

SEQ ID NO: 249 - protein, 5 aa, Homo sapiens
SFWMN

SEQ ID NO: 250 - protein, 17 aa, Homo sapiens
NINQDGSEKYYVDSVKG

SEQ ID NO: 251 - protein, 14 aa, Homo sapiens
GGPDYGDLHYGMDV

SEQ ID NO: 252 - protein, 123 aa, Homo sapiens
EVQLVESGGGLVQPGGSLSLSCAASGFTFRSFWMNWVRQAPGKEAEWVANINQDGSEKYYVDSVKGRFTISRDNAKNSLFLQMNSLRAEDTAVYYCARGGPDYGDLHYGMDVWGQGTTVTVSS

SEQ ID NO: 253 - protein, 5 aa, Homo sapiens
SYWMN

SEQ ID NO: 254 - protein, 17 aa, Homo sapiens
NINQDGSEKYYVDSVKG

SEQ ID NO: 255 - protein, 14 aa, Homo sapiens
GGPDYGDLHYGMDV

SEQ ID NO: 256 - protein, 123 aa, Homo sapiens
EVQLVESGGGLVQPGGSLRLSCAASGFTFRSYWMNWVRQAPGKEAEWVANINQDGSEKYYVDSVKGRFTISRDNAKNSLFLQMNSLRDEDTAVYYCARGGPDYGDLHYGMDVWGQGTTVTVSS

SEQ ID NO: 257 - protein, 5 aa, Homo sapiens
NYWMI

SEQ ID NO: 258 - protein, 17 aa, Homo sapiens
NINQDGSEKYYVDSVKG

SEQ ID NO: 259 - protein, 14 aa, Homo sapiens
GGEDYGNSHYGMDV

SEQ ID NO: 260 - protein, 123 aa, Homo sapiens
EVQLVESGGGLVQPGGSLRLSCAASGFTFSNYWMIWYRQAPGEELEWVANINQDGSEKYYVDSVKGRFTISRDNAKNSLYLQMHSLRAEDTAVYYCARGGEDYGNSHYGMDVWGQGTMVTVSS

SEQ ID NO: 261 - protein, 5 aa, Homo sapiens
NYWMN

SEQ ID NO: 262 - protein, 17 aa, Homo sapiens
NINQDGSERYYVDSVKG

SEQ ID NO: 263 - protein, 14 aa, Homo sapiens
GGEGYGIDHYGLDV

SEQ ID NO: 264 - protein, 123 aa, Homo sapiens
EVQLVESGGGLVQPGGSLRLSCAASGFTFSNYWMNWVRQAPGKGLEWVANINQDGSERYYVDSVKGRFTISRDNAKSSLYLQMNSLRAEDTAVYFCARGGEGYGIDHYGLDVSGQGTTVTVSS

SEQ ID NO: 265 - protein, 5 aa, Homo sapiens
SYWMS

SEQ ID NO: 266 - protein, 17 aa, Homo sapiens
NINQDGSERYYVDSVKG

SEQ ID NO: 267 - protein, 14 aa, Homo sapiens
GGEGYGVDHYGLDV

SEQ ID NO: 268 - protein, 123 aa, Homo sapiens
QVQLVESGGGLVQPGGSLRLSCAASGFTFSSYWMSWVRQAPGKGLEWVANINQDGSERYYVDSVKGRFTISRDNAKSSLYLQMSSLRAEDTAVYFCARGGEGYGVDHYGLDVSGQGTTVTVSS

SEQ ID NO: 269 - protein, 5 aa, Homo sapiens
NYWMI

SEQ ID NO: 270 - protein, 17 aa, Homo sapiens
NINQDGSEKYYVDSVEG

SEQ ID NO: 271 - protein, 14 aa, Homo sapiens
GGEGYGVDHYGLDV

SEQ ID NO: 272 - protein, 123 aa, Homo sapiens
QVQLVESGGGLVQPGGSLRLSCAASGFTFSNYWMIWVRQAPGKGLEWVANINQDGSEKYYVDSVEGRFTISRDNAKSSLYLQMSNLRAEDTAVYFCARGGEGYGVDHYGLDVSGQGTTVTVSS

SEQ ID NO: 273 - protein, 5 aa, Homo sapiens
NYWMN

SEQ ID NO: 274 - protein, 17 aa, Homo sapiens
NINQDGSEKYYVDSVKG

SEQ ID NO: 275 - protein, 14 aa, Homo sapiens
GGTGYGSDHYGMDV

SEQ ID NO: 276 - protein, 123 aa, Homo sapiens
QVQLVESGGGLVQPGGSLRLSCAATGFTLSNYWMNWVRQAPGKGLEWVANINQDGSEKYYVDSVKGRFTISRDNAKNSLFLQMNSLRAEDTAVYYCARGGTGYGSDHYGMDVSGQGTTVTVSS

SEQ ID NO: 277 - protein, 5 aa, Homo sapiens
NYWMN

SEQ ID NO: 278 - protein, 17 aa, Homo sapiens
NINQDGSENYYVDSVKG

SEQ ID NO: 279 - protein, 14 aa, Homo sapiens
GGFGYGDSHYGMDV

SEQ ID NO: 280 - protein, 123 aa, Homo sapiens
EVQLVESGGGLVQPGGSLRLSCAASGFNFSNYWMNWVRQAPGKELEWVANINQDGSENYYVDSVKGRFTISRDNVKNSLFLQMNRLRADDTAVYYCARGGFGYGDSHYGMDVWGQGTTVTVSS

SEQ ID NO: 281 - protein, 5 aa, Homo sapiens
NYWMI

SEQ ID NO: 282 - protein, 17 aa, Homo sapiens
NINQNGSERYYVDSVQG

SEQ ID NO: 283 - protein, 14 aa, Homo sapiens
GGADYSNSHYGMDV

SEQ ID NO: 284 - protein, 123 aa, Homo sapiens
EVQLVESGGGLVQPGGSLRLSCAASGFTFGNYWMIWVRQAPGKELEWLANINQNGSERYYVDSVQGRFTISRDNAKNSLYLQMNSLRAEDTAVYYCARGGADYSNSHYGMDVSGQGTTVTVSS

SEQ ID NO: 285 - protein, 5 aa, Homo sapiens
SYWMS

SEQ ID NO: 286 - protein, 17 aa, Homo sapiens
NINQDGSERYYVDSVKG

SEQ ID NO: 287 - protein, 14 aa, Homo sapiens
GGEGYGVDHYGLDV

SEQ ID NO: 288 - protein, 123 aa, Homo sapiens
QVQLVESGGGLVQPGGSLRLSCAASGFTFSSYWMSWVRQAPGKGLEWVANINQDGSERYYVDSVKGRFTISRDNANNSLHLQMSSLRAEDTAVYFCARGGEGYGVDHYGLDVSGQGTTVTVSS

SEQ ID NO: 289 - protein, 5 aa, Homo sapiens
SYWMN

SEQ ID NO: 290 - protein, 17 aa, Homo sapiens
NINPDGSEKYYVDSVQG

SEQ ID NO: 291 - protein, 14 aa, Homo sapiens
GGPGYGDLHYGMDV

SEQ ID NO: 292 - protein, 123 aa, Homo sapiens
EVQLVESGGGLVQPGGSLRLSCAASGFTFRSYWMNWVRQAPGKEAEWVANINPDGSEKYYVDSVQGRHTISRDNAKNSLFLEMNSLRVEDTALYYCARGGPGYGDLHYGMDVWGQGTTVTVSS

SEQ ID NO: 293 - protein, 5 aa, Homo sapiens
NYWMN

SEQ ID NO: 294 - protein, 17 aa, Homo sapiens
NINQDGSEKYYVDSVEG

SEQ ID NO: 295 - protein, 14 aa, Homo sapiens
GGEGYGVDHYGLDV

SEQ ID NO: 296 - protein, 123 aa, Homo sapiens
QVQLVESGGGLVQPGGSLRLSCAATGFTLSNYWMNWVRQAPGKGLEWVANINQDGSEKYYVDSVEGRFTISRDNAKSSLYLQMSSLRAEDTAVYFCARGGEGYGVDHYGLDVSGQGTTVTVSS

SEQ ID NO: 297 - protein, 5 aa, Homo sapiens
DYYMS

SEQ ID NO: 298 - protein, 17 aa, Homo sapiens
NINQDGSERYYVDSVKG

SEQ ID NO: 299 - protein, 14 aa, Homo sapiens
GGEGYGVDHYGLDV

SEQ ID NO: 300 - protein, 123 aa, Homo sapiens
QVQLVESGGGLVQPGGSLRLSCAASGFTFSDYYMSWIRQAPGKGLEWVANINQDGSERYYVDSVKGRFTISRDNAKNSLYLQMSSLRAEDTAVYFCARGGEGYGVDHYGLDVSGQGTTVTVSS

SEQ ID NO: 301 - protein, 5 aa, Homo sapiens
NYWMN

SEQ ID NO: 302 - protein, 17 aa, Homo sapiens
NINQDGSERYYVDSVKG

SEQ ID NO: 303 - protein, 14 aa, Homo sapiens
GGEGYGVDHYGLDV

SEQ ID NO: 304 - protein, 123 aa, Homo sapiens
EVQLVESGGGLVQPGGSLRLSCAATGFTLSNYWMNWVRQAPGKGLEWVANINQDGSERYYVDSVKGRFTISRDNAKNSLYLQMSSLRAEDTAVYFCARGGEGYGVDHYGLDVSGQGTTVTVSS

SEQ ID NO: 305 - protein, 5 aa, Homo sapiens
NYWMN

SEQ ID NO: 306 - protein, 17 aa, Homo sapiens
NINQDGSERYYVDSVKG

SEQ ID NO: 307 - protein, 14 aa, Homo sapiens
GGEGYGVDHYGLDV

SEQ ID NO: 308 - protein, 123 aa, Homo sapiens
QVQLVESGGGLVQPGGSLRLSCAASGFTLSNYWMNWVRQAPGKGLEWVANINQDGSERYYVDSVKGRFTISRDNAKNSLYLQMSSLRAEDTAVYFCARGGEGYGVDHYGLDVSGQGTTVTVSS

SEQ ID NO: 309 - protein, 5 aa, Homo sapiens
NYWMN

SEQ ID NO: 310 - protein, 17 aa, Homo sapiens
NINQDGSERYYVDSVKG

SEQ ID NO: 311 - protein, 14 aa, Homo sapiens
GGEGYGVDHYGLDV

SEQ ID NO: 312 - protein, 123 aa, Homo sapiens
QVQLVESGGGLVQPGGSLRLSCAATGFTLSNYWMNWVRQAPGKGLEWVANINQDGSERYYVDSVKGRFTISRDNAKNSLYLQMSSLRAEDTAVYFCARGGEGYGVDHYGLDVSGQGTTVTVSS

SEQ ID NO: 313 - protein, 5 aa, Homo sapiens
NYWMN

SEQ ID NO: 314 - protein, 17 aa, Homo sapiens
NINQDGSERYYVDSVKG

SEQ ID NO: 315 - protein, 14 aa, Homo sapiens
GGEGYGVNHYGLDV

SEQ ID NO: 316 - protein, 123 aa, Homo sapiens
QVQLVESGGGLVQPGGSLRLSCAATGFTLSNYWMNWVRQAPGKGLEWVANINQDGSERYYVDSVKGRFTISRDNAKNSLYLQMSSLRAEDTAVYFCARGGEGYGVNHYGLDVSGQGTTVTVSS

SEQ ID NO: 317 - protein, 5 aa, Homo sapiens
DYYMS

SEQ ID NO: 318 - protein, 17 aa, Homo sapiens
NIKQDGSERYYVDSVKG

SEQ ID NO: 319 - protein, 14 aa, Homo sapiens
GGEGYGVDHYGLDV

SEQ ID NO: 320 - protein, 123 aa, Homo sapiens
QVQLVESGGGLVKPGGSLRLSCVASGFTFSDYYMSWIRQAPGKGLEWVANIKQDGSERYYVDSVKGRFTISRDNAKSSLYLQMSSLRAEDTAVYFCARGGEGYGVDHYGLDVSGQGTTVTVSS

SEQ ID NO: 321 - protein, 5 aa, Homo sapiens
NYWMN

SEQ ID NO: 322 - protein, 17 aa, Homo sapiens
NINQDGSERYYVDSVEG

SEQ ID NO: 323 - protein, 14 aa, Homo sapiens
GGEGYGVDHYGLDV

SEQ ID NO: 324 - protein, 123 aa, Homo sapiens
QVQLVESGGGLVQPGGSLRLSCAATGFTLSNYWMNWVRQAPGKGLEWVANINQDGSERYYVDSVEGRFTISRDNAKSSLYLQMSNLRAEDTAVYFCARGGEGYGVDHYGLDVSGQGTTVTVSS

SEQ ID NO: 325 - protein, 5 aa, Homo sapiens
NYWMN

SEQ ID NO: 326 - protein, 17 aa, Homo sapiens
NINQDGSERYYVDSVKG

SEQ ID NO: 327 - protein, 14 aa, Homo sapiens
GGEGYGVDHYGLDV

SEQ ID NO: 328 - protein, 123 aa, Homo sapiens
QVQLVESGGGLVQPGGSLRLSCAATGFTLSNYWMNWVRQAPGKGLEWVANINQDGSERYYVDSVKGRFTISRDNAKSSLYLQMSSLRAEDTAVYFCARGGEGYGVDHYGLDVSGQGTTVTVSS

SEQ ID NO: 329 - protein, 5 aa, Homo sapiens
NYWMN

SEQ ID NO: 330 - protein, 17 aa, Homo sapiens
NINQDGSERYYVDSVKG

SEQ ID NO: 331 - protein, 14 aa, Homo sapiens
GGEGYGVDHYGLDV

SEQ ID NO: 332 - protein, 123 aa, Homo sapiens
QVQLQESGGGLVQPGGSLRLSCAATGFTLSNYWMNWVRQAPGKGLEWVANINQDGSERYYVDSVKGRFTISRDNAKNSLYLQMSSLRAEDTAVYFCARGGEGYGVDHYGLDVSGQGTTVTVSS

SEQ ID NO: 333 - protein, 5 aa, Homo sapiens
NYWMN

SEQ ID NO: 334 - protein, 17 aa, Homo sapiens
NINQDGSERYYVDSVKG

SEQ ID NO: 335 - protein, 14 aa, Homo sapiens
GGEGYGVDHYGLDV

SEQ ID NO: 336 - protein, 123 aa, Homo sapiens
QVQLVESGGGLVKPGGSLRLSCAATGFTLSNYWMNWVRQAPGKGLEWVANINQDGSERYYVDSVKGRFTISRDNAKNSLYLQMSSLRAEDTAVYFCARGGEGYGVDHYGLDVSGQGTTVTVSS

SEQ ID NO: 337 - protein, 5 aa, Homo sapiens
NYWMN

SEQ ID NO: 338 - protein, 17 aa, Homo sapiens
NINQDGSERYYVDSVKG

SEQ ID NO: 339 - protein, 14 aa, Homo sapiens
GGEGYGVDHYGLDV

SEQ ID NO: 340 - protein, 123 aa, Homo sapiens
QVQLVESGGGLVQPGGSLRLSCAATGFTLSNYWMNWVRQAPGKGLEWVANINQDGSERYYVDSVKGRFTISRDNANNSLHLQMSSLRAEDTAVYFCARGGEGYGVDHYGLDVSGQGTTVTVSS

SEQ ID NO: 341 - protein, 5 aa, Homo sapiens
NYWMN

SEQ ID NO: 342 - protein, 17 aa, Homo sapiens
NINQDGSERYYVDSVEG

SEQ ID NO: 343 - protein, 14 aa, Homo sapiens
GGEGYGVDHYGLDV

SEQ ID NO: 344 - protein, 123 aa, Homo sapiens
QVQLGESGGGLVQPGGSLRLSCAATGFTLSNYWMNWVRQAPGKGLEWVANINQDGSERYYVDSVEGRFTISRDNAKSSLYLQMSNLRAEDTAVYFCARGGEGYGVDHYGLDVSGQGTTVTVSS

SEQ ID NO: 345 - protein, 5 aa, Homo sapiens
NYWMN

SEQ ID NO: 346 - protein, 17 aa, Homo sapiens
NINQDGSERYYVDSVKG

SEQ ID NO: 347 - protein, 14 aa, Homo sapiens
GGEGYGVDHYGLDV

SEQ ID NO: 348 - protein, 123 aa, Homo sapiens
QVQLVESGGGLVQPGGSLKLSCAATGFTLSNYWMNWVRQAPGKGLEWVANINQDGSERYYVDSVKGRFTISRDNAKSSLYLQMSSLRAEDTAVYFCARGGEGYGVDHYGLDVSGQGTTVTVSS

SEQ ID NO: 349 - protein, 5 aa, Homo sapiens
NYWMN

SEQ ID NO: 350 - protein, 17 aa, Homo sapiens
NINQDGSERYYVDSVKG

SEQ ID NO: 351 - protein, 14 aa, Homo sapiens
GGEGYGVDHYGLDV

SEQ ID NO: 352 - protein, 123 aa, Homo sapiens
QVQLQESGGGLVQPGGSLRLSCAATGFTLSNYWMNWVRQAPGKGLEWVANINQDGSERYYVDSVKGRFTISRGNAKNSLYLQMSSLRAEDTAVYFCARGGEGYGVDHYGLDVSGQGTTVTVSS

SEQ ID NO: 353 - protein, 5 aa, Homo sapiens
DYGMS

SEQ ID NO: 354 - protein, 17 aa, Homo sapiens
NINQDGSERYYVDSVKG

SEQ ID NO: 355 - protein, 14 aa, Homo sapiens
GGEGYGVDHYGLDV

SEQ ID NO: 356 - protein, 123 aa, Homo sapiens
QVQLVESGGGVVQPGRSLRLSCAASGFTFDDYGMSWVRQAPGKGLEWVANINQDGSERYYVDSVKGRFTISRDNAKNSLYLQMSSLRAEDTAVYFCARGGEGYGVDHYGLDVSGQGTTVTVSS

SEQ ID NO: 357 - protein, 5 aa, Homo sapiens
SHWMT

SEQ ID NO: 358 - protein, 17 aa, Homo sapiens
HIKEDGSEKYYEDSVEG

SEQ ID NO: 359 - protein, 14 aa, Homo sapiens
GGDGYSDSHFGVDV

SEQ ID NO: 360 - protein, 123 aa, Homo sapiens
EVQLVESGGGLVQPGGSLRLSCAASGFTFSSHWMTWVRQAPGKGLEWVAHIKEDGSEKYYEDSVEGRFTVSRDNAKNSVYLQMNSLRAEDTAVYYCARGGDGYSDSHFGVDVWGQGTTVTVSS

SEQ ID NO: 361 - protein, 5 aa, Homo sapiens
SHWMT

SEQ ID NO: 362 - protein, 17 aa, Homo sapiens
HIKEDGSEKYYVDSVKG

SEQ ID NO: 363 - protein, 14 aa, Homo sapiens
GGDGYSDSHFGVDV

SEQ ID NO: 364 - protein, 123 aa, Homo sapiens
EVQLVESGGGLVQPGGSLRLSCAASGFTFSSHWMTWFRQAPGKGLEWVAHIKEDGSEKYYVDSVKGRFTVSRDNAKNSVYLQMNSLRAEDTAVYYCARGGDGYSDSHFGVDVWGQGTTVTVSS

SEQ ID NO: 365 - protein, 5 aa, Homo sapiens
SHWMT

SEQ ID NO: 366 - protein, 17 aa, Homo sapiens
HIKEDGSEKYYEDSVKG

SEQ ID NO: 367 - protein, 14 aa, Homo sapiens
GGDGYSDSHFGVDV

SEQ ID NO: 368 - protein, 123 aa, Homo sapiens
EVQLVESGGGLVQPGGSLRLSCAASGFTFSSHWMTWFRQAPGKGLEWVAHIKEDGSEKYYEDSVKGRFTVSRDNAKNSVYLQMNSLRAEDTAVYYCARGGDGYSDSHFGVDVWGQGTTVTVSS

SEQ ID NO: 369 - protein, 5 aa, Homo sapiens
SHWMT

SEQ ID NO: 370 - protein, 17 aa, Homo sapiens
HIKEDGSEKYYEDSVEG

SEQ ID NO: 371 - protein, 14 aa, Homo sapiens
GGDGYSDSHFGVDV

SEQ ID NO: 372 - protein, 123 aa, Homo sapiens
EVQLVESGGGLVQPGGSLRLSCAASGFTFSSHWMTWFRQAPGKGLEWVAHIKEDGSEKYYEDSVEGRFTISRDNAKNSVYLQMNSLRAEDTAVYYCARGGDGYSDSHFGVDVWGQGTTVTVSS

SEQ ID NO: 373 - protein, 5 aa, Homo sapiens
SHWMT

SEQ ID NO: 374 - protein, 17 aa, Homo sapiens
HIKEDGSEKYYEDSVEG

SEQ ID NO: 375 - protein, 14 aa, Homo sapiens
GGDGYSDSHFGVDV

SEQ ID NO: 376 - protein, 123 aa, Homo sapiens
EVQLVESGGGLVQPGGSLRLSCAASGFTFSSHWMTWFRQAPGKGLEWVAHIKEDGSEKYYEDSVEGRFTVSRDNAKNSLYLQMNSLRAEDTAVYYCARGGDGYSDSHFGVDVWGQGTTVTVSS

SEQ ID NO: 377 - protein, 5 aa, Homo sapiens
SHWMT

SEQ ID NO: 378 - protein, 17 aa, Homo sapiens
HIKEDGSEKYYVDSVKG

SEQ ID NO: 379 - protein, 14 aa, Homo sapiens
GGDGYSDSHFGVDV

SEQ ID NO: 380 - protein, 123 aa, Homo sapiens
EVQLVESGGGLVQPGGSLRLSCAASGFTFSSHWMTWVRQAPGKGLEWVAHIKEDGSEKYYVDSVKGRFTISRDNAKNSLYLQMNSLRAEDTAVYYCARGGDGYSDSHFGVDVWGQGTTVTVSS

SEQ ID NO: 381 - protein, 5 aa, Homo sapiens
SHWMT

SEQ ID NO: 382 - protein, 17 aa, Homo sapiens
HIKEDGSEKYYVDSVKG

SEQ ID NO: 383 - protein, 14 aa, Homo sapiens
GGDGYSDSHFGVDV

SEQ ID NO: 384 - protein, 123 aa, Homo sapiens
EVQLVESGGGLVQPGGSLRLSCAASGFTFSSHWMTWFRQAPGKGLEWVAHIKEDGSEKYYVDSVKGRFTISRDNAKNSLYLQMNSLRAEDTAVYYCARGGDGYSDSHFGVDVWGQGTTVTVSS

SEQ ID NO: 385 - protein, 5 aa, Homo sapiens
SHWMT

SEQ ID NO: 386 - protein, 17 aa, Homo sapiens
HIKEDESEKYYVDSVKG

SEQ ID NO: 387 - protein, 14 aa, Homo sapiens
GGVGYSISHFGVDV

SEQ ID NO: 388 - protein, 123 aa, Homo sapiens
EVQLVESGGGLVQPGGSLRLSCAASGFTFSSHWMTWVRQAPGKGLEWVAHIKEDESEKYYVDSVKGRFTISRDNAKNSLYLQMNSLRAEDTAVYYCARGGVGYSISHFGVDVWGQGTTVTVSS

SEQ ID NO: 389 - protein, 5 aa, Homo sapiens
SHWMT

SEQ ID NO: 390 - protein, 17 aa, Homo sapiens
HIKEDESEKYYVDSVKG

SEQ ID NO: 391 - protein, 14 aa, Homo sapiens
GGEGYSISHFGVDV

SEQ ID NO: 392 - protein, 123 aa, Homo sapiens
EVQLVESGGGLVQPGGSLRLSCAASGFTFSSHWMTWVRQAPGKGLEWVAHIKEDESEKYYVDSVKGRFTISRDNAKNSLYLQMNSLRAEDTAVYYCARGGEGYSISHFGVDVWGQGTTVTVSS

SEQ ID NO: 393 - protein, 5 aa, Homo sapiens
SHWMT

SEQ ID NO: 394 - protein, 17 aa, Homo sapiens
HIKEDESEKYYVDSVKG

SEQ ID NO: 395 - protein, 14 aa, Homo sapiens
GGDGYSDSHFGVDV

SEQ ID NO: 396 - protein, 123 aa, Homo sapiens
EVQLVESGGGLVQPGGSLRLSCAASGFTFSSHWMTWFRQAPGKGLEWVAHIKEDESEKYYVDSVKGRFTISRDNAKNSLYLQMNSLRAEDTAVYYCARGGDGYSDSHFGVDVWGQGTTVTVSS

SEQ ID NO: 397 - protein, 5 aa, Homo sapiens
SHWMT

SEQ ID NO: 398 - protein, 17 aa, Homo sapiens
HIKEDESEKYYVDSVKG

SEQ ID NO: 399 - protein, 14 aa, Homo sapiens
GGDGYSISHFGVDV

SEQ ID NO: 400 - protein, 123 aa, Homo sapiens
EVQLVESGGGLVQPGGSLRLSCAASGFTFSSHWMTWFRQAPGKGLEWVAHIKEDESEKYYVDSVKGRFTISRDNAKNSLYLQMNSLRAEDTAVYYCARGGDGYSISHFGVDVWGQGTTVTVSS

SEQ ID NO: 401 - protein, 5 aa, Homo sapiens
SHWMT

SEQ ID NO: 402 - protein, 17 aa, Homo sapiens
HIKEGGSEKYYVDSVKG

SEQ ID NO: 403 - protein, 14 aa, Homo sapiens
GGDGYSDSHFGVDV

SEQ ID NO: 404 - protein, 123 aa, Homo sapiens
EVQLVESGGGLVQPGGSLRLSCAASGFTFSSHWMTWFRQAPGKGLEWVAHIKEGGSEKYYVDSVKGRFTISRDNAKNSLYLQMNSLRAEDTAVYYCARGGDGYSDSHFGVDVWGQGTTVTVSS

SEQ ID NO: 405 - protein, 5 aa, Homo sapiens
SHWMT

SEQ ID NO: 406 - protein, 17 aa, Homo sapiens
HIKEEGSEKYYVDSVKG

SEQ ID NO: 407 - protein, 14 aa, Homo sapiens
GGDGYSDSHFGVDV

SEQ ID NO: 408 - protein, 123 aa, Homo sapiens
EVQLVESGGGLVQPGGSLRLSCAASGFTFSSHWMTWFRQAPGKGLEWVAHIKEEGSEKYYVDSVKGRFTISRDNAKNSLYLQMNSLRAEDTAVYYCARGGDGYSDSHFGVDVWGQGTTVTVSS

SEQ ID NO: 409 - protein, 5 aa, Homo sapiens
SHWMT

SEQ ID NO: 410 - protein, 17 aa, Homo sapiens
HIKEDGSEKYYVDSVKG

SEQ ID NO: 411 - protein, 14 aa, Homo sapiens
GGEGYSDSHFGVDV

SEQ ID NO: 412 - protein, 123 aa, Homo sapiens
EVQLVESGGGLVQPGGSLRLSCAASGFTFSSHWMTWFRQAPGKGLEWVAHIKEDGSEKYYVDSVKGRFTISRDNAKNSLYLQMNSLRAEDTAVYYCARGGEGYSDSHFGVDVWGQGTTVTVSS

SEQ ID NO: 413 - protein, 5 aa, Homo sapiens
SHWMT

SEQ ID NO: 414 - protein, 17 aa, Homo sapiens
HIKEDGSEKYYVDSVKG

SEQ ID NO: 415 - protein, 14 aa, Homo sapiens
GGVGYSDSHFGVDV

SEQ ID NO: 416 - protein, 123 aa, Homo sapiens
EVQLVESGGGLVQPGGSLRLSCAASGFTFSSHWMTWFRQAPGKGLEWVAHIKEDGSEKYYVDSVKGRFTISRDNAKNSLYLQMNSLRAEDTAVYYCARGGVGYSDSHFGVDVWGQGTTVTVSS

SEQ ID NO: 417 - protein, 5 aa, Homo sapiens
SHWMT

SEQ ID NO: 418 - protein, 17 aa, Homo sapiens
HIKEDESEKYYVDSVKG

SEQ ID NO: 419 - protein, 14 aa, Homo sapiens
GGVGYSISHFGVDV

SEQ ID NO: 420 - protein, 123 aa, Homo sapiens
EVQLVESGGGLVQPGGSLRLSCAASGFTFSSHWMTWFRQAPGKGLEWVAHIKEDESEKYYVDSVKGRFTISRDNAKNSLYLQMNSLRAEDTAVYYCARGGVGYSISHFGVDVWGQGTTVTVSS

SEQ ID NO: 421 - protein, 5 aa, Homo sapiens
SHWMT

SEQ ID NO: 422 - protein, 17 aa, Homo sapiens
HIKEDESEKYYVDSVKG

SEQ ID NO: 423 - protein, 14 aa, Homo sapiens
GGEGYSISHFGVDV

SEQ ID NO: 424 - protein, 123 aa, Homo sapiens
EVQLVESGGGLVQPGGSLRLSCAASGFTFSSHWMTWFRQAPGKGLEWVAHIKEDESEKYYVDSVKGRFTISRDNAKNSLYLQMNSLRAEDTAVYYCARGGEGYSISHFGVDVWGQGTTVTVSS

SEQ ID NO: 425 - protein, 5 aa, Homo sapiens
NYWMN

SEQ ID NO: 426 - protein, 17 aa, Homo sapiens
NINQDGSERYYVDSVKG

SEQ ID NO: 427 - protein, 14 aa, Homo sapiens
GGEGYGVDHYGLDV

SEQ ID NO: 428 - protein, 123 aa, Homo sapiens
EVQLVESGGGLVQPGGSLRLSCAASGFTLSNYWMNWVRQAPGKGLEWVANINQDGSERYYVDSVKGRFTISRDNAKNSLYLQMSSLRAEDTAVYFCARGGEGYGVDHYGLDVSGQGTTVTVSS

SEQ ID NO: 429 - protein, 5 aa, Homo sapiens
NYWMN

SEQ ID NO: 430 - protein, 17 aa, Homo sapiens
NINQDGSERYYVDSVKG

SEQ ID NO: 431 - protein, 14 aa, Homo sapiens
GGEGYGVDHYGLDV

SEQ ID NO: 432 - protein, 123 aa, Homo sapiens
EVQLVESGGGLVQPGGSLRLSCAATGFTLSNYWMNWVRQAPGKGLEWVANINQDGSERYYVDSVKGRFTISRDNAKNSLYLQMNSLRAEDTAVYFCARGGEGYGVDHYGLDVSGQGTTVTVSS

SEQ ID NO: 433 - protein, 5 aa, Homo sapiens
NYWMN

SEQ ID NO: 434 - protein, 17 aa, Homo sapiens
NINQDGSERYYVDSVKG

SEQ ID NO: 435 - protein, 14 aa, Homo sapiens
GGEGYGVDHYGLDV

SEQ ID NO: 436 - protein, 123 aa, Homo sapiens
EVQLVESGGGLVQPGGSLRLSCAATGFTLSNYWMNWVRQAPGKGLEWVANINQDGSERYYVDSVKGRFTISRDNAKNSLYLQMSSLRAEDTAVYYCARGGEGYGVDHYGLDVSGQGTTVTVSS

SEQ ID NO: 437 - protein, 5 aa, Homo sapiens
NYWMN

SEQ ID NO: 438 - protein, 17 aa, Homo sapiens
NINQDGSERYYVDSVKG

SEQ ID NO: 439 - protein, 14 aa, Homo sapiens
GGEGYGVDHYGLDV

SEQ ID NO: 440 - protein, 123 aa, Homo sapiens
EVQLVESGGGLVQPGGSLRLSCAASGFTLSNYWMNWVRQAPGKGLEWVANINQDGSERYYVDSVKGRFTISRDNAKNSLYLQMNSLRAEDTAVYFCARGGEGYGVDHYGLDVSGQGTTVTVSS

SEQ ID NO: 441 - protein, 5 aa, Homo sapiens
NYWMN

SEQ ID NO: 442 - protein, 17 aa, Homo sapiens
NINQDGSERYYVDSVKG

SEQ ID NO: 443 - protein, 14 aa, Homo sapiens
GGEGYGVDHYGLDV

SEQ ID NO: 444 - protein, 123 aa, Homo sapiens
EVQLVESGGGLVQPGGSLRLSCAASGFTLSNYWMNWVRQAPGKGLEWVANINQDGSERYYVDSVKGRFTISRDNAKNSLYLQMSSLRAEDTAVYYCARGGEGYGVDHYGLDVSGQGTTVTVSS

SEQ ID NO: 445 - protein, 5 aa, Homo sapiens
NYWMN

SEQ ID NO: 446 - protein, 17 aa, Homo sapiens
NINQDGSERYYVDSVKG

SEQ ID NO: 447 - protein, 14 aa, Homo sapiens
GGEGYGVDHYGLDV

SEQ ID NO: 448 - protein, 123 aa, Homo sapiens
EVQLVESGGGLVQPGGSLRLSCAATGFTLSNYWMNWVRQAPGKGLEWVANINQDGSERYYVDSVKGRFTISRDNAKNSLYLQMNSLRAEDTAVYYCARGGEGYGVDHYGLDVSGQGTTVTVSS

SEQ ID NO: 449 - protein, 5 aa, Homo sapiens
NYWMN

SEQ ID NO: 450 - protein, 17 aa, Homo sapiens
NINQDGSERYYVDSVKG

SEQ ID NO: 451 - protein, 14 aa, Homo sapiens
GGEGYGVDHYGLDV

SEQ ID NO: 452 - protein, 123 aa, Homo sapiens
EVQLVESGGGLVQPGGSLRLSCAASGFTLSNYWMNWVRQAPGKGLEWVANINQDGSERYYVDSVKGRFTISRDNAKNSLYLQMNSLRAEDTAVYYCARGGEGYGVDHYGLDVSGQGTTVTVSS

SEQ ID NO: 453 - protein, 5 aa, Homo sapiens
NYWMN

SEQ ID NO: 454 - protein, 17 aa, Homo sapiens
NINQDESERYYVDSVKG

SEQ ID NO: 455 - protein, 14 aa, Homo sapiens
GGEGYGVDHYGLDV

SEQ ID NO: 456 - protein, 123 aa, Homo sapiens
EVQLVESGGGLVQPGGSLRLSCAASGFTLSNYWMNWVRQAPGKGLEWVANINQDESERYYVDSVKGRFTISRDNAKNSLYLQMNSLRAEDTAVYYCARGGEGYGVDHYGLDVSGQGTTVTVSS

SEQ ID NO: 457 - protein, 5 aa, Homo sapiens
DYYMS

SEQ ID NO: 458 - protein, 17 aa, Homo sapiens
YISGSGDIIDYADSVKG

SEQ ID NO: 459 - protein, 13 aa, Homo sapiens
EDSRLTGTTDFDN

SEQ ID NO: 460 - protein, 122 aa, Homo sapiens
EVQLVESGGGLVKPGGSLRVSCAASGFTFSDYYMSWFRQAPGKGLEWVSYISGSGDIIDYADSVKGRFTISRDNAKNSLYLQMNNLRAEDTAVYHCAREDSRLTGTTDFDNWGQGTLVTVSS

SEQ ID NO: 461 - protein, 5 aa, Homo sapiens
DYYMS

SEQ ID NO: 462 - protein, 17 aa, Homo sapiens
YISGSGDIIDYADSVKG

SEQ ID NO: 463 - protein, 13 aa, Homo sapiens
EDSRIPGTTDFDN

SEQ ID NO: 464 - protein, 122 aa, Homo sapiens
EVQLVESGGGLVKPGGSLRVSCAASGFTFSDYYMSWFRQAPGKGLEWVSYISGSGDIIDYADSVKGRFTISRDNAKNSLYLQMNSLRAEDTAVYHCAKEDSRIPGTTDFDNWGQGTLVTVSS

SEQ ID NO: 465 - protein, 5 aa, Homo sapiens
DYYMS

SEQ ID NO: 466 - protein, 17 aa, Homo sapiens
YISGSGDIIDYADSVKG

SEQ ID NO: 467 - protein, 13 aa, Homo sapiens
EDSRIPGTTDFDN

SEQ ID NO: 468 - protein, 122 aa, Homo sapiens
EVQLVESGGGLVKPGGSLRVSCAASGFTFSDYYMSWFRQAPGKGLEWISYISGSGDIIDYADSVKGRFTISRDNAKNSLYLQMNSLRAEDTAVYHCAKEDSRIPGTTDFDNWGQGTLVTVSS

SEQ ID NO: 469 - protein, 5 aa, Homo sapiens
DYYMS

SEQ ID NO: 470 - protein, 17 aa, Homo sapiens
YISGSGDVIDYADSVKG

SEQ ID NO: 471 - protein, 13 aa, Homo sapiens
EDSRIPGTTDFDN

SEQ ID NO: 472 - protein, 122 aa, Homo sapiens
EVQLVESGGGLVKPGGSLRVSCAASGFTFSDYYMSWFRQAPGKGLEWVSYISGSGDVIDYADSVKGRFTISRDNAKNSLYLQMNSLRAEDTAVYHCAKEDSRIPGTTDFDNWGQGTLVTVSS

SEQ ID NO: 473 - protein, 5 aa, Homo sapiens
DYYMS

SEQ ID NO: 474 - protein, 17 aa, Homo sapiens
YISGSGDIIDYADSVKG

SEQ ID NO: 475 - protein, 13 aa, Homo sapiens
EDSRIPGTTDFDN

SEQ ID NO: 476 - protein, 122 aa, Homo sapiens
EVQLVESGGGLVKPGGSLRLSCAVSGFTFSDYYMSWFRQAPGKGLEWVSYISGSGDIIDYADSVKGRFTISRDNAKNSLYLQMNSLRAEDTAVYHCAKEDSRIPGTTDFDNWGQGTLVTVSS

SEQ ID NO: 477 - protein, 5 aa, Homo sapiens
DYYMS

SEQ ID NO: 478 - protein, 17 aa, Homo sapiens
YISGSGDIIDYADSVKG

SEQ ID NO: 479 - protein, 13 aa, Homo sapiens
EDSRIPGTTDFDS

SEQ ID NO: 480 - protein, 122 aa, Homo sapiens
EVQLVESGGGLVKPGGSLRVSCAASGFTFSDYYMSWFRQAPGKGLEWVSYISGSGDIIDYADSVKGRFTISRDNAKNSLYLQMNSLRAEDTAVYHCAKEDSRIPGTTDFDSWGQGTMVTVSS

SEQ ID NO: 481 - protein, 5 aa, Homo sapiens
DYYMS

SEQ ID NO: 482 - protein, 17 aa, Homo sapiens
YISGSGTTIDYADSVKG

SEQ ID NO: 483 - protein, 13 aa, Homo sapiens
EDIRMTGTTDFDN

SEQ ID NO: 484 - protein, 122 aa, Homo sapiens
EVQLVESGGGLVKPGGSLRLSCAASGFTFSDYYMSWFRQAPGKGLEWVSYISGSGTTIDYADSVKGRFTISRDNARNSLYLQMNSLRAEDTAVYYCAREDIRMTGTTDFDNWGQGTLVTVSS

SEQ ID NO: 485 - protein, 5 aa, Homo sapiens
DYYMS

SEQ ID NO: 486 - protein, 17 aa, Homo sapiens
HISGSGTTIDYADSVKG

SEQ ID NO: 487 - protein, 13 aa, Homo sapiens
EDSRMPGTTDFDN

SEQ ID NO: 488 - protein, 122 aa, Homo sapiens
EVQLVESGGGLVKPGGSLRLSCAASGFAFSDYYMSWFRQAPGKGLEWVSHISGSGTTIDYADSVKGRFTISRDNAKNSLYLQMNSLRAEDTAVYHCAREDSRMPGTTDFDNWGQGTLVTVSS

SEQ ID NO: 489 - protein, 5 aa, Homo sapiens
DYYMT

SEQ ID NO: 490 - protein, 17 aa, Homo sapiens
YISGSGDTIDYAESVKG

SEQ ID NO: 491 - protein, 13 aa, Homo sapiens
EDSRIAGTTDFDN

SEQ ID NO: 492 - protein, 122 aa, Homo sapiens
EVQLVESGGGLVKPGGSLRLSCAASGFTFSDYYMTWFRQAPGKGLEWISYISGSGDTIDYAESVKGRFTISRDNAKNSLYLQMNSLRAEDTAVYHCAREDSRIAGTTDFDNWGPGTLVTVSS

SEQ ID NO: 493 - protein, 5 aa, Homo sapiens
DYYMT

SEQ ID NO: 494 - protein, 17 aa, Homo sapiens
YISSSGSNIDYADSVKG

SEQ ID NO: 495 - protein, 13 aa, Homo sapiens
EDSRLSGTTDFDY

SEQ ID NO: 496 - protein, 122 aa, Homo sapiens
EVQLVESGGGLVKPGGSLRLSCAASGFTFSDYYMTWFRQAPGKGLEWVSYISSSGSNIDYADSVKGRFTISRDNAKNSLYLQMNSLRAEDTAVYYCAREDSRLSGTTDFDYWGQGTLVTVSS

SEQ ID NO: 497 - protein, 5 aa, Homo sapiens
DYYMT

SEQ ID NO: 498 - protein, 17 aa, Homo sapiens
YISGSGDTIDYAESVKG

SEQ ID NO: 499 - protein, 13 aa, Homo sapiens
EDSRIAGTTDFDN

SEQ ID NO: 500 - protein, 122 aa, Homo sapiens
EVQLVESGGGLVQPGGSLRLSCAASGFTFSDYYMTWFRQAPGKGLEWISYISGSGDTIDYAESVKGRFTISRDNAKNSLYLQMNSLRAEDTAVYHCAREDSRIAGTTDFDNWGPGTLVTVSS

SEQ ID NO: 501 - protein, 5 aa, Homo sapiens
DYYMS

SEQ ID NO: 502 - protein, 17 aa, Homo sapiens
HISGSGTTIDYADSVKG

SEQ ID NO: 503 - protein, 13 aa, Homo sapiens
EDIRMTGTTDFDH

SEQ ID NO: 504 - protein, 122 aa, Homo sapiens
EVQLVESGGGLVKPGGSLRLSCAASGFTFSDYYMSWFRQAPGKGLEWVSHISGSGTTIDYADSVKGRFTISRDNARKSLYLQMNSLRAEDTAVYYCAREDIRMTGTTDFDHWGQGTLVTVSS

SEQ ID NO: 505 - protein, 5 aa, Homo sapiens
DYYMS

SEQ ID NO: 506 - protein, 17 aa, Homo sapiens
HISSSGNTIDYADSVKG

SEQ ID NO: 507 - protein, 13 aa, Homo sapiens
EDPRLPGTTDFDY

SEQ ID NO: 508 - protein, 122 aa, Homo sapiens
QVQLVESGGGLVKPGGSLRLSCAASGFTFSDYYMSWFRQAPGKGLEWVSHISSSGNTIDYADSVKGRFTISRDNAKNSLYLQMNSLRAEDTAVYYCAREDPRLPGTTDFDYWGQGTLVTVSS

SEQ ID NO: 509 - protein, 5 aa, Homo sapiens
DYYMT

SEQ ID NO: 510 - protein, 17 aa, Homo sapiens
YISGSGDTIDYAESVKG

SEQ ID NO: 511 - protein, 13 aa, Homo sapiens
EDIRMPGTTDFDH

SEQ ID NO: 512 - protein, 122 aa, Homo sapiens
EVQLVESGGGLVKPGGSLRLSCAASGFTFSDYYMTWFRQAPGKGLEWISYISGSGDTIDYAESVKGRFTISRDNAKNSLYLQMNSLRAEDTAVYYCAREDIRMPGTTDFDHWGQGTLVTVSS

SEQ ID NO: 513 - protein, 5 aa, Homo sapiens
DYYMS

SEQ ID NO: 514 - protein, 17 aa, Homo sapiens
HISGSGTTIDYADSVKG

SEQ ID NO: 515 - protein, 13 aa, Homo sapiens
EDIRMPGTTDFDH

SEQ ID NO: 516 - protein, 122 aa, Homo sapiens
EVQLVESGGGLVKPGGSLRLSCAVSGFTFSDYYMSWFRQAPGKGLEWVSHISGSGTTIDYADSVKGRFTISRDNARNSLYLQMNSLRAEDTAVYYCAREDIRMPGTTDFDHWGQGTLVTVSS

SEQ ID NO: 517 - protein, 5 aa, Homo sapiens
DYYMS

SEQ ID NO: 518 - protein, 17 aa, Homo sapiens
HISSSGSTIDYADSVKG

SEQ ID NO: 519 - protein, 13 aa, Homo sapiens
  MISC_FEATURE: CDR3 of SEQ ID NO: 520
EDPRLTGTTDFDY

SEQ ID NO: 520 - protein, 122 aa, Homo sapiens
QVQLVESGGGLVKPGGSLRLSCAASGFTFSDYYMSWIRQAPGKGLEWVSHISSSGSTIDYADSVKGRFTISRDNAKNSLYLQMNSLRAEDTAVYYCAREDPRLTGTTDFDYWGQGALVTVSS

SEQ ID NO: 521 - protein, 5 aa, Homo sapiens
DYYMS

SEQ ID NO: 522 - protein, 17 aa, Homo sapiens
YISSSGSTISYADSVKG

SEQ ID NO: 523 - protein, 13 aa, Homo sapiens
EDPRISGTTDFDN

SEQ ID NO: 524 - protein, 122 aa, Homo sapiens
QVQLVESGGGLVKPGGSLRLSCAASGFTFSDYYMSWIRQAPGKGLEWVSYISSSGSTISYADSVKGRFTISRDNAKNSLYLQMNSLRAEDTAVYYCAREDPRISGTTDFDNWGQGTLVTVSS

SEQ ID NO: 525 - protein, 5 aa, Homo sapiens
DYYMS

SEQ ID NO: 526 - protein, 17 aa, Homo sapiens
HISSSGNTIDYADSVKG

SEQ ID NO: 527 - protein, 13 aa, Homo sapiens
EDPRLPGTTDFDY

SEQ ID NO: 528 - protein, 122 aa, Homo sapiens
QVQLQESGGGLVKPGGSLRLSCAASGFTFSDYYMSWFRQAPGKGLEWVSHISSSGNTIDYADSVKGRFTISRDNAKNSLYLQMNSLRAEDTAVYYCAREDPRLPGTTDFDYWGQGTLVTVSS

SEQ ID NO: 529 - protein, 5 aa, Homo sapiens
DYYMS

SEQ ID NO: 530 - protein, 17 aa, Homo sapiens
YISGTGITTDYADSVKG

SEQ ID NO: 531 - protein, 13 aa, Homo sapiens
EDPRLPGTSEFDN

SEQ ID NO: 532 - protein, 122 aa, Homo sapiens
QVQLVESGGGLVKPGGSLRLSCAASGFTFSDYYMSWFRQAPGKGLEWVSYISGTGITTDYADSVKGRFTISRDNAKNSLYLQMNSLRAEDTAVYYCAREDPRLPGTSEFDNWGQGTLVTVSS

SEQ ID NO: 533 - protein, 5 aa, Homo sapiens
DYYMS

SEQ ID NO: 534 - protein, 17 aa, Homo sapiens
HISSSGSTIDYADSVKG

SEQ ID NO: 535 - protein, 13 aa, Homo sapiens
EDPRMPGTFDFDN

SEQ ID NO: 536 - protein, 122 aa, Homo sapiens
EVQLVESGGGLVKPGGSLRLSCAASGFTFSDYYMSWIRQAPGKGLEWVSHISSSGSTIDYADSVKGRFTISRDNAKNSLYLQMNSLRAEDTAVYYCAREDPRMPGTFDFDNWGQGTLVTVSS

SEQ ID NO: 537 - protein, 5 aa, Homo sapiens
DYYMS

SEQ ID NO: 538 - protein, 17 aa, Homo sapiens
HISGSGTTIDYADSVKG

SEQ ID NO: 539 - protein, 13 aa, Homo sapiens
EDIRMPGTTDFDH

SEQ ID NO: 540 - protein, 122 aa, Homo sapiens
EVQLVESGGGLVKPGGSLRLSCAASGFAFSDYYMSWFRQAPGKGLEWVSHISGSGTTIDYADSVKGRFTISRDNARNSLYLQMNSLRAEDTAVYYCAREDIRMPGTTDFDHWGQGTLVTVSS

SEQ ID NO: 541 - protein, 5 aa, Homo sapiens
DYYMS

SEQ ID NO: 542 - protein, 17 aa, Homo sapiens
HISGSGTTIDYADSVKG

SEQ ID NO: 543 - protein, 13 aa, Homo sapiens
EDIRMPGTTDFDH

SEQ ID NO: 544 - protein, 122 aa, Homo sapiens
EVQLVESGGGLVKPGGSLRLSCAVSGFTFSDYYMSWFRQAPGKGLEWVSHISGSGTTIDYADSVKGRFTISRDNARDSLYLQMNSLRAEDTAVYYCAREDIRMPGTTDFDHWGQGTLVTVSS

SEQ ID NO: 545 - protein, 5 aa, Homo sapiens
DYYMS

SEQ ID NO: 546 - protein, 17 aa, Homo sapiens
HISGSGTTIDYADSVKG

SEQ ID NO: 547 - protein, 13 aa, Homo sapiens
EDIRMPGTTDFDH

SEQ ID NO: 548 - protein, 122 aa, Homo sapiens
EVQLVESGGGLVTPGGSLRLSCAVSGFTFSDYYMSWFRQAPGKGLEWVSHISGSGTTIDYADSVKGRFTISRDNARNSLYLQMNSLRAEDTAVYYCAREDIRMPGTTDFDHWGQGTLVTVSS

SEQ ID NO: 549 - protein, 5 aa, Homo sapiens
DYYMS

SEQ ID NO: 550 - protein, 17 aa, Homo sapiens
HISGSGTTIDYADSVKG

SEQ ID NO: 551 - protein, 13 aa, Homo sapiens
EDIRMPGTTDFDH

SEQ ID NO: 552 - protein, 122 aa, Homo sapiens
EVQLVESGGGLVKPGGSLRLSCAVSGFTFSDYYMSWFRQAPGKGLEWVSHISGSGTTIDYADSVKGRFTISRDNARNSLYLQMNSLRAEDTAMYYCAREDIRMPGTTDFDHWGQGTLVTVSS

SEQ ID NO: 553 - protein, 5 aa, Homo sapiens
DYYMS

SEQ ID NO: 554 - protein, 17 aa, Homo sapiens
HISGSGTTIDYADSVKD

SEQ ID NO: 555 - protein, 13 aa, Homo sapiens
EDIRMPGTTDFDH

SEQ ID NO: 556 - protein, 122 aa, Homo sapiens
EVQLVESGGGLVKPGGSLRLSCAASGFAFSDYYMSWFRQAPGKGLEWVSHISGSGTTIDYADSVKDRFTISRDNARNSLYLQMNSLRAEDTAVYYCAREDIRMPGTTDFDHWGQGTLVTVSS

SEQ ID NO: 557 - protein, 5 aa, Homo sapiens
DYYMS

SEQ ID NO: 558 - protein, 17 aa, Homo sapiens
HISSSGTTIDYADSVKG

SEQ ID NO: 559 - protein, 13 aa, Homo sapiens
EDIRMPGTTDFDN

SEQ ID NO: 560 - protein, 122 aa, Homo sapiens
EVQLVESGGGLVKPGGSLRLSCTASGFTFTDYYMSWFRQAPGKGLEWVSHISSSGTTIDYADSVKGRFTISRDNAKNSLYLQMNSLRADDTAVYYCAREDIRMPGTTDFDNWGQGTLVTVSS

SEQ ID NO: 561 - protein, 5 aa, Homo sapiens
DYYMT

SEQ ID NO: 562 - protein, 17 aa, Homo sapiens
YISSSGSTISYADSVKG

SEQ ID NO: 563 - protein, 13 aa, Homo sapiens
EDIRMSGTTDFDY

SEQ ID NO: 564 - protein, 122 aa, Homo sapiens
QVQLVESGGGLVKPGGSLRLSCAASGFTFSDYYMTWFRQAPGKGLEWVSYISSSGSTISYADSVKGRFTISRDNANNSLYLQMNSLRAEDTAVYHCAREDIRMSGTTDFDYWGQGTLVTVSS

SEQ ID NO: 565 - protein, 5 aa, Homo sapiens
DYYMS

SEQ ID NO: 566 - protein, 17 aa, Homo sapiens
HISSSGSSIDYADSVKG

SEQ ID NO: 567 - protein, 13 aa, Homo sapiens
EDPRLSGTIDFDS

SEQ ID NO: 568 - protein, 122 aa, Homo sapiens
QVQLVESGGGLVKPGGSLRLSCAASGFIFSDYYMSWFRQAPGKGLEWVSHISSSGSSIDYADSVKGRFTISRDNAKNSLYLQMNSLRAEDTAVYYCAREDPRLSGTIDFDSWGQGTLVTVSS

SEQ ID NO: 569 - protein, 5 aa, Homo sapiens
DYYMS

SEQ ID NO: 570 - protein, 17 aa, Homo sapiens
HIGGSGTTIDYADSVKG

SEQ ID NO: 571 - protein, 13 aa, Homo sapiens
EDIRMPGTTDFDH

SEQ ID NO: 572 - protein, 122 aa, Homo sapiens
EVQLVESGGGLVKPGGSLRLSCAASGFAFSDYYMSWFRQAPGKGLEWVSHIGGSGTTIDYADSVKGRFTISRDNARNSLYLQMNSLRAEDTAVYYCAREDIRMPGTTDFDHWGQGTLVTVSS

SEQ ID NO: 573 - protein, 5 aa, Homo sapiens
DYYMS

SEQ ID NO: 574 - protein, 17 aa, Homo sapiens
YISSSGSTIYYADSVKG

SEQ ID NO: 575 - protein, 13 aa, Homo sapiens
EDPRVPGTTNFDY

SEQ ID NO: 576 - protein, 122 aa, Homo sapiens
QVQLVESGGGLVKPGGSLRLSCAASGFTFSDYYMSWIRQAPGKGLEWVSYISSSGSTIYYADSVKGRFTISRDNAKNSLYLQMNSLRAEDTAVYYCAREDPRVPGTTNFDYWGQGTLVTVSS

SEQ ID NO: 577 - protein, 5 aa, Homo sapiens
DYYMT

SEQ ID NO: 578 - protein, 17 aa, Homo sapiens
YISGSGSTIDYADSVKG

SEQ ID NO: 579 - protein, 13 aa, Homo sapiens
EDGRIPGTTDFDH

SEQ ID NO: 580 - protein, 122 aa, Homo sapiens
QVQLVESGGGLVKPGGSLRLSCAASGFTFSDYYMTWMRQAPGKGLEWVSYISGSGSTIDYADSVKGRFTISRDNAKNSLYLQMNSLRPEDTAVYYCAKEDGRIPGTTDFDHWGQGTLVTVSS

SEQ ID NO: 581 - protein, 5 aa, Homo sapiens
DYYMS

SEQ ID NO: 582 - protein, 17 aa, Homo sapiens
HISGSGTTIDYADSVKD

SEQ ID NO: 583 - protein, 13 aa, Homo sapiens
EDIRMPGTTDFDH

SEQ ID NO: 584 - protein, 122 aa, Homo sapiens
EVQLVESGGGLVQPGGSLRLSCAASGFAFSDYYMSWFRQAPGKGLEWVSHISGSGTTIDYADSVKDRFTISRDNARNSLYLQMNSLRAEDTAVYYCAREDIRMPGTTDFDHWGQGTLVTVSS

SEQ ID NO: 585 - protein, 5 aa, Homo sapiens
DYFMS

SEQ ID NO: 586 - protein, 17 aa, Homo sapiens
HISSSGNSIDYADSVKG

SEQ ID NO: 587 - protein, 13 aa, Homo sapiens
EDPRLPGTTDFDY

SEQ ID NO: 588 - protein, 122 aa, Homo sapiens
QVQLVESGGGLVKPGGSLRLSCAASGFPFSDYFMSWFRQAPGKGLEWVSHISSSGNSIDYADSVKGRFTISRDNAKNSLYLQMNSLRAEDTAVYYCAKEDPRLPGTTDFDYWGQGTLVTVSS

SEQ ID NO: 589 - protein, 5 aa, Homo sapiens
DSYMS

SEQ ID NO: 590 - protein, 17 aa, Homo sapiens
HISNSGSTISYADSVKG

SEQ ID NO: 591 - protein, 13 aa, Homo sapiens
EDPRLPGTSDFDY

SEQ ID NO: 592 - protein, 122 aa, Homo sapiens
QVQLVESGGGLVKPGGSLRLSCAASGFTFSDSYMSWIRQAPGKGLEWVSHISNSGSTISYADSVKGRFTISRDNAKNSLYLQMNSLRAEDTAVYYCAREDPRLPGTSDFDYWGQGTLVTVSS

SEQ ID NO: 593 - protein, 5 aa, Homo sapiens
DYYMS

SEQ ID NO: 594 - protein, 17 aa, Homo sapiens
HISSSGSSIDYADSVKG

SEQ ID NO: 595 - protein, 13 aa, Homo sapiens
EDPRLSGTTDFDQ

SEQ ID NO: 596 - protein, 122 aa, Homo sapiens
QVQLVESGGGVVQPGRSLRLSCAASGFTFSDYYMSWIRQAPGKGLEWVSHISSSGSSIDYADSVKGRFTISRDNAKNSLYLQMNSLRDEDTAVYYCAREDPRLSGTTDFDQWGQGTLVTVSS

SEQ ID NO: 597 - protein, 5 aa, Homo sapiens
SYWMS

SEQ ID NO: 598 - protein, 17 aa, Homo sapiens
HISSSGSTIDYAESVKG

SEQ ID NO: 599 - protein, 13 aa, Homo sapiens
EDPRMTGTTDFDY

SEQ ID NO: 600 - protein, 122 aa, Homo sapiens
QVQLVESGGGLVQPGGSLRLSCAASGFTFSSYWMSWVRQAPGKGLEWVSHISSSGSTIDYAESVKGRFTISRDNAKNSLYLQMNSLRAEDTAVYYCAREDPRMTGTTDFDYWGQGTLVTVSS

SEQ ID NO: 601 - protein, 5 aa, Homo sapiens
NYFMS

SEQ ID NO: 602 - protein, 17 aa, Homo sapiens
HISSSGNTIDYADSVKG

SEQ ID NO: 603 - protein, 13 aa, Homo sapiens
EDPRLPGTTDFDY

SEQ ID NO: 604 - protein, 122 aa, Homo sapiens
QVQLQESGGGLVKPGGSLRLSCAASGFTFSNYFMSWIRQAPGKGLEWVSHISSSGNTIDYADSVKGRFTISRDNAKNSLYLQMDSLRAEDTAVYYCSREDPRLPGTTDFDYWGQGTLVTVSS

SEQ ID NO: 605 - protein, 5 aa, Homo sapiens
DYYMT

SEQ ID NO: 606 - protein, 17 aa, Homo sapiens
YISSGGSTIHYADSVKG

SEQ ID NO: 607 - protein, 13 aa, Homo sapiens
ENPRLPGTMDFDY

SEQ ID NO: 608 - protein, 122 aa, Homo sapiens
EVQLVESGGGVVKPGGSLRLSCAASGFTFSDYYMTWIRQGPGKGQEWISYISSGGSTIHYADSVKGRFTISRDNAKNSLYLQMNSLRAEDTAVYYCARENPRLPGTMDFDYWGQGTLVTVSS

SEQ ID NO: 609 - protein, 5 aa, Homo sapiens
DHFMS

SEQ ID NO: 610 - protein, 17 aa, Homo sapiens
NIKQDGSEKYYVDSVKG

SEQ ID NO: 611 - protein, 13 aa, Homo sapiens
EDPRLTGTTDFDN

SEQ ID NO: 612 - protein, 122 aa, Homo sapiens
QVQLVESGGGLVQPGGSLRLSCAASGFTFSDHFMSWFRQAPGKGLEWVANIKQDGSEKYYVDSVKGRFTISRDNAKNSLFLQMNSLRAEDTAMYYCAREDPRLTGTTDFDNWGQGTLVTVSS

SEQ ID NO: 613 - protein, 5 aa, Homo sapiens
NYWMT

SEQ ID NO: 614 - protein, 17 aa, Homo sapiens
HISSTGSTIDYADSVKG

SEQ ID NO: 615 - protein, 13 aa, Homo sapiens
EDPRLPGTMDFDY

SEQ ID NO: 616 - protein, 122 aa, Homo sapiens
EVQLVESGGGLVQAGGSLRLSCVASGFTFSNYWMTWFRQAPGRGLEWVSHISSTGSTIDYADSVKGRFTISRDNAENSLYLQMNSLRAEDTAVYYCAREDPRLPGTMDFDYWGQGTLVTVSS

SEQ ID NO: 617 - protein, 5 aa, Homo sapiens
DYYMS

SEQ ID NO: 618 - protein, 17 aa, Homo sapiens
YISGSGDIIDYADSVKG

SEQ ID NO: 619 - protein, 13 aa, Homo sapiens
EDSRLTGTTDFDN

SEQ ID NO: 620 - protein, 122 aa, Homo sapiens
EVQLVESGGGLVKPGGSLRLSCAASGFTFSDYYMSWFRQAPGKGLEWVSYISGSGDIIDYADSVKGRFTISRDNAKNSLYLQMNNLRAEDTAVYHCAREDSRLTGTTDFDNWGQGTLVTVSS

SEQ ID NO: 621 - protein, 5 aa, Homo sapiens
DYYMS

SEQ ID NO: 622 - protein, 17 aa, Homo sapiens
YISGSGDIIDYADSVKG

SEQ ID NO: 623 - protein, 13 aa, Homo sapiens
EDSRLTGTTDFDN

SEQ ID NO: 624 - protein, 122 aa, Homo sapiens
EVQLVESGGGLVKPGGSLRVSCAASGFTFSDYYMSWIRQAPGKGLEWVSYISGSGDIIDYADSVKGRFTISRDNAKNSLYLQMNNLRAEDTAVYHCAREDSRLTGTTDFDNWGQGTLVTVSS

SEQ ID NO: 625 - protein, 5 aa, Homo sapiens
DYYMS

SEQ ID NO: 626 - protein, 17 aa, Homo sapiens
YISGSGDIIDYADSVKG

SEQ ID NO: 627 - protein, 13 aa, Homo sapiens
EDSRLTGTTDFDN

SEQ ID NO: 628 - protein, 122 aa, Homo sapiens
EVQLVESGGGLVKPGGSLRVSCAASGFTFSDYYMSWFRQAPGKGLEWVSYISGSGDIIDYADSVKGRFTISRDNAKNSLYLQMNNLRAEDTAVYYCAREDSRLTGTTDFDNWGQGTLVTVSS

SEQ ID NO: 629 - protein, 5 aa, Homo sapiens
DYYMS

SEQ ID NO: 630 - protein, 17 aa, Homo sapiens
YISGSGDIIDYADSVKG

SEQ ID NO: 631 - protein, 13 aa, Homo sapiens
EDSRLTGTTDFDN

SEQ ID NO: 632 - protein, 122 aa, Homo sapiens
EVQLVESGGGLVKPGGSLRVSCAASGFTFSDYYMSWFRQAPGKGLEWVSYISGSGDIIDYADSVKGRFTISRDNAKNSLYLQMNSLRAEDTAVYHCAREDSRLTGTTDFDNWGQGTLVTVSS

SEQ ID NO: 633 - protein, 5 aa, Homo sapiens
DYYMS

SEQ ID NO: 634 - protein, 17 aa, Homo sapiens
YISGSGDIIDYADSVKG

SEQ ID NO: 635 - protein, 13 aa, Homo sapiens
EDSRLTGTTDFDN

SEQ ID NO: 636 - protein, 122 aa, Homo sapiens
EVQLVESGGGLVKPGGSLRLSCAASGFTFSDYYMSWFRQAPGKGLEWVSYISGSGDIIDYADSVKGRFTISRDNAKNSLYLQMNNLRAEDTAVYYCAREDSRLTGTTDFDNWGQGTLVTVSS

SEQ ID NO: 637 - protein, 5 aa, Homo sapiens
DYYMS

SEQ ID NO: 638 - protein, 17 aa, Homo sapiens
YISGSGDIIDYADSVKG

SEQ ID NO: 639 - protein, 13 aa, Homo sapiens
EDSRLTGTTDFDN

SEQ ID NO: 640 - protein, 122 aa, Homo sapiens
EVQLVESGGGLVKPGGSLRLSCAASGFTFSDYYMSWIRQAPGKGLEWVSYISGSGDIIDYADSVKGRFTISRDNAKNSLYLQMNSLRAEDTAVYYCAREDSRLTGTTDFDNWGQGTLVTVSS

SEQ ID NO: 641 - protein, 5 aa, Homo sapiens
DYYMS

SEQ ID NO: 642 - protein, 17 aa, Homo sapiens
YISGSGDIIDYADSVKG

SEQ ID NO: 643 - protein, 13 aa, Homo sapiens
EDSRLTGTTDFDN

SEQ ID NO: 644 - protein, 122 aa, Homo sapiens
EVQLVESGGGLVKPGGSLRLSCAASGFTFSDYYMSWFRQAPGKGLEWVSYISGSGDIIDYADSVKGRFTISRDNAKNSLYLQMNSLRAEDTAVYYCAREDSRLTGTTDFDNWGQGTLVTVSS

SEQ ID NO: 645 - protein, 5 aa, Homo sapiens
DYYMS

SEQ ID NO: 646 - protein, 17 aa, Homo sapiens
YISGSGDIIDYADSVKG

SEQ ID NO: 647 - protein, 13 aa, Homo sapiens
EDARLTGTTDFDN

SEQ ID NO: 648 - protein, 122 aa, Homo sapiens
EVQLVESGGGLVKPGGSLRLSCAASGFTFSDYYMSWIRQAPGKGLEWVSYISGSGDIIDYADSVKGRFTISRDNAKNSLYLQMNSLRAEDTAVYYCAREDARLTGTTDFDNWGQGTLVTVSS

SEQ ID NO: 649 - protein, 5 aa, Homo sapiens
DYYMS

SEQ ID NO: 650 - protein, 17 aa, Homo sapiens
YISGSGDIIDYADSVKG

SEQ ID NO: 651 - protein, 13 aa, Homo sapiens
EDPRLTGTTDFDN

SEQ ID NO: 652 - protein, 122 aa, Homo sapiens
EVQLVESGGGLVKPGGSLRLSCAASGFTFSDYYMSWIRQAPGKGLEWVSYISGSGDIIDYADSVKGRFTISRDNAKNSLYLQMNSLRAEDTAVYYCAREDPRLTGTTDFDNWGQGTLVTVSS

SEQ ID NO: 653 - protein, 5 aa, Homo sapiens
DYYMS

SEQ ID NO: 654 - protein, 17 aa, Homo sapiens
YISGSGDIIDYADSVKG

SEQ ID NO: 655 - protein, 13 aa, Homo sapiens
EDARLTGTTDFDN

SEQ ID NO: 656 - protein, 122 aa, Homo sapiens
EVQLVESGGGLVKPGGSLRLSCAASGFTFSDYYMSWFRQAPGKGLEWVSYISGSGDIIDYADSVKGRFTISRDNAKNSLYLQMNSLRAEDTAVYYCAREDARLTGTTDFDNWGQGTLVTVSS

SEQ ID NO: 657 - protein, 5 aa, Homo sapiens
DYYMS

SEQ ID NO: 658 - protein, 17 aa, Homo sapiens
YISGSGDIIDYADSVKG

SEQ ID NO: 659 - protein, 13 aa, Homo sapiens
EDPRLTGTTDFDN

SEQ ID NO: 660 - protein, 122 aa, Homo sapiens
EVQLVESGGGLVKPGGSLRLSCAASGFTFSDYYMSWFRQAPGKGLEWVSYISGSGDIIDYADSVKGRFTISRDNAKNSLYLQMNSLRAEDTAVYYCAREDPRLTGTTDFDNWGQGTLVTVSS

SEQ ID NO: 661 - DNA, 369 bp, Homo sapiens
gaggtgcagctggtggagtctgggggaggcttggtccagccgggggggtccctgagactctcctgtgcagcctctggattcacctttagtagccattggatgacttggttccgtcaggctccagggaaggggctggagtgggtggcccacataaaggaagacggaagtgagaaatactatgaggactctgtggagggccgattcaccgtctccagagacaacgccaagaactcggtatatctgcaaatgaacagtctgagagccgaagacacggctgtgtattactgtgcgagaggaggtgatggctacagtgactcccacttcggtgtggacgtctggggccaagggaccacggtcactgtctcttca

SEQ ID NO: 662 - DNA, 369 bp, Homo sapiens
gaggtgcagctggtggagtctgggggaggcttggtccagccgggggggtccctgagactctcctgtgcagcctctggattcacctttagtagttattggatgacttggttccgtcaggctccagggaaggggctggagtgggtggcccacataaaggaagacggaagtgagaaatactatgtggactctgtggagggccgattcaccatctccagagacaacgccaataactcgctgtatctacaaatgaacagcctgagagccgaggacacggctgtgtattactgtgcgagaggaggtgatggctacagtgactcccactacggtgtggacgtctggggccaagggaccacggtcaccgtctcctca

SEQ ID NO: 663 - DNA, 369 bp, Homo sapiens
gaggtgcagctggtggagtctgggggaggcttggtccagcctggggggtccctgagactctcctgtgcagcctctggattcacctttagtagttattggatgacctggttccgccaggctccagggagggggctggagtgggtggccaacataaaccaagatggaagtgagaaatactatgtggactctgtggagggccgattcaccgtctccagagacaacgccaagaactcactgtatctgcaaatgaacagcctgagagccgaggacacggctgtgtattactgtgcgagagggggattaggctacggtgactcccactacggtatggacgtctggggccaagggaccacggtcactgtctcctca

SEQ ID NO: 664 - DNA, 369 bp, Homo sapiens
gaggtgcagctggtggagtctgggggaggcttggtccagccgggggggtccctgagactctcctgtgcagcctctggattcacctttagtaactattggatgacctggttccgccaggctccagggggggggctggagtgggtggccaacataaaccaagatggaagtgagaaatactatgtggactctgtggagggccgattcaccgtctccagagacaacgccaagaactcactgtatctacaaatgaacagcctgagagccgaggacacggctgtgtattactgtgcgagagggggattaggctacggtgactcccactacggtatggacgtctggggccaagggaccacggtcactgtctcctca

SEQ ID NO: 665 - DNA, 369 bp, Homo sapiens
gaggtgcagctggtggagtctgggggaggcttggtccagcctggggggtccctgagactctcctgtgcagcctctggattcacctttagtaactattggatgatctggttccgccaggctccaggaaaggggctggagtgggtggccaacataaaccaagatggaagtgagaaatactatgtggactctgtggagggccgattcaccatctccagagacaacgccaagaactcactgtatctgcaaatgaacagcctgagagccgaagacacggctgtgtattactgtgcgagaggaggtgatggctacagtggctcccaccacggtacggacgtctggggccaagggaccacggtcaccgtctcctca

SEQ ID NO: 666 - DNA, 369 bp, Homo sapiens
gaggtgcagctggtggagtctgggggaggcttggtccagcctggggggtccctgagactctcctgtgcagcctctggattcacctttagtagctattggatgagctgggtccgccaggctccagggaaggggctggagtgggtggccaacataaagcaagatggaagtgagaaatactatgtggactctgtgaagggccgattcaccatctccagagacaacgccaagaactcactgtatctgcaaatgaacagcctgagagccgaggacacggctgtgtattactgtgcgagagggggggaaggctatagcacctcgcactacggtatggacgtctggggccaagggaccacggtcaccgtctcctca

SEQ ID NO: 667 - DNA, 369 bp, Homo sapiens
gaggtgcagctggtggagtctgggggaggcttggtccagcctggggggtccctgagactctcctgtggagcctctggattcacctttagtagctattggatgctctggttccgccaggctccagggaaggggctggagtgggtggccaacataaaccaagatggaagtgagaaatactatgtggactctgtgaagggccgattcaccatctccagagacaacgccaagaactcactgtatctgcaaatgaacaccctgagagccgaggacacggctatttattattgtgcgagagggggtgatggctacagtgactcccacttcggtacggacgtctggggccaagggaccacggtcactgtctcctca

SEQ ID NO: 668 - DNA, 369 bp, Homo sapiens
gaggtgcagctggtggagtctgggggaggcttggtccagcctggggggtccctgagactctcctgtggagcctctggattcacctttagtagctattggatgttctggttccgccaggctccaggagaggggctggagtgggtggccaacataaaccaagatggaagtgagaaatactatgtggactctgtggagggccgattcaccatctccagagacaacgccaagaactctctgtatctgcaaatgaacagcctgagagccgaggacacggctatttattactgtgcgagaggaggtgatggctacagtgattcccactacggtacggacgtctggggccaagggaccacggtcaccgtctcctca

SEQ ID NO: 669 - DNA, 369 bp, Homo sapiens
gaggtgcagctggtggagtctgggggaggcttggtccagccgggggggtccctgagactctcctgtgcagcctctggattcacctttagtaactattggatgacctggttccgccaggctccagggggggggctggagtgggtggccaacataaaccaagatgggagtgagaagtactatgtggactctgtggagggccgattcaccgtctccagagacaacgccaagaactcactggatctgcaaatgaacagcctgagagccgaggacacggctgtgtattactgtgcgagagggggattaggctacggtgactcccactacggtatggacgtctggggccaagggaccacggtcaccgtctcctca

SEQ ID NO: 670 - DNA, 369 bp, Homo sapiens
gaggtgcagctggtggagtctgggggaggcttggtccagcctggggggtccctgagactctcctgtgcagcctctggattcacctttagtgactattggatgaactgggcccgccaggctccagggaaggggctggagtgggtggccaacataaaggaggatggaagtgagaaatactatgtggactctgtggagggccgattcaccatatccagagacaacgccaagaactcaacgtatctgcaaatgaacagcctgagagtcgaggacacggctgtgtattactgtgcgagaggaggggccgggtatagcatgtctcactacggtatggacgtctggggccaagggaccacggtcactgtctcttca

SEQ ID NO: 671 - DNA, 369 bp, Homo sapiens
gaggtgcagctggtggagtctgggggaggcttggtccagcctggggggtccctgagactctcctgtgaagcctctggattcacctttagtgactattggatgaactgggcccgccaggctccagggaaggggctggagtgggtggccaacataaaggaggatggaagtgagaaatactatgtggactctgtggagggccgattcaccatatccagagacaacgccaagaactcaacgtatctgcaaatgaacagcctgagagccgaggacacggctgtgtattactgtgcgagaggaggggccgggtatagtatgtctcactacggtatggacgtctggggccaagggaccacggtcactgtctcctca

SEQ ID NO: 672 - DNA, 369 bp, Homo sapiens
gaggtgcagctggtggagtctgggggaggcttggtccagcctggggggtccctgagactctcctgtggagcctctggattcacctttagtagctattggatgctctggttccgccaggctccagggaaggggctggagtgggtggccaacataaaccaagatggaagtgagaaatactatgtggactctgtgaagggccgattcaccatctccagagacaacgccaagaactcactgtatctgcaaatgaacaccctgcgagccgaggacacggctatttattattgtgcgagagggggtgatggctacagtaactcccacttcggtacggacgtctggggccaagggaccacggtcaccgtctcttca

SEQ ID NO: 673 - DNA, 369 bp, Homo sapiens
gaggtgcagctggtggagtctgggggaggcttggtcaagcctggggggtccctgagactctcctgtggagcctctggattcacctttagtagctattggatgttctggttccgccaggctccaggagaggggctggagtgggtggccaacataaaccaagatggaagtgagaaatactatgtggactctgtggagggccgattcaccatctccagagacaacgccaagaactctctgtatctgcaaatgaacagcctgagagccgaggacacggctatttattactgtgcgagaggaggtgatggctacagtgattcccactacggtacggacgtctggggccaagggaccacggtcaccgtctcctca

SEQ ID NO: 674 - DNA, 369 bp, Homo sapiens
gaggtgcagctggtggagtctgggggaggcttggtccagcctggggggtccctgagactctcctgtgcagcctctggattcacctttagtaattattggatgaactgggtccgccaggctccagggaaggggctggagtgggtggccaacataaaggaagatggaagtgagaattactatgtggactctgtgaagggccgattcaccatctccagagacaacgccaagaactcactgtatctgcaaatgaacagcctgagagccgaggacacggctgtttattactgtgcgagagggggggaaggctatagcacctcgcactacggtatggacgtctggggccaagggaccacggtcactgtctcctca

SEQ ID NO: 675 - DNA, 369 bp, Homo sapiens
gaggtgcagctggtggagtctgggggaggcttggtccagcctggggggtccctgagactctcctgtggagcctctggattcacctttagtacctattggatgctctggttccgccaggctccagggaaggggctggagtgggtggccaacataaaccaagatggaagtgagaaatactatgtggactctgtgaagggccgattcaccatctccagagacaacgccaagaactcactgtctctacaaatgaacagcctgagagccgaggacacggcaacttattactgtgcgagaggaggtgatggctacagtgactcccacttcggtacggacgtctggggccaagggaccacggtcaccgtctcctca

SEQ ID NO: 676 - DNA, 369 bp, Homo sapiens
gaggtgcagctggtggagtctgggggaggcttggtccagcctggggggtccctgagactctcctgtgtagcctctggattcacctttagtaactattggatgatgtggttccgccaggctccaggaaaggggctggagtgggtggccaacataaaccaagatggaagtgagaaatactttgtggactctgtggagggccgattcaccatctccagagacaacgccaagaactcactgtatctgcaaatgaacagcctgagagccgaagacacggctgtgtattactgtgcgagaggaggtgatggctacagtagctctcactacggtacggacgtctggggccaagggaccacggtcaccgtctcttca

SEQ ID NO: 677 - DNA, 369 bp, Homo sapiens
gaggtgcagctggtggagtctgggggaggcttggtccagcctggggggtccctgagactctcctgtgcagcctctggattcacctttagtagctattggatgaactgggtccgccaggctccagggaaggggctggagtgggtggccaacataaaggaagatggaagtgagaaatactatgtggactctgtgaagggccgattcaccatctccagagacaacgccaagaactcactgtatctgcaaatgaacagcctgagagccgaggacacggctgtgtattactgtgcgagagggggggacagctatggttacagggactacggtatggacgtctggggccaagggaccacggtcactgtctcctca

SEQ ID NO: 678 - DNA, 369 bp, Homo sapiens
gaggtgcagctggtggagtctgggggaggcttggtccagcctggggggtccctgagactctcctgtgcagcctctggattcacctttagtacccattggatgaactgggcccgccaggctccagggaaggagctggaatgggtggccaacataaaccaagatggaagtgagaaatactatgtggactctgtggagggccgattcaccatctccagagacaacgccaacaattcactgtatctgcaaatgaacagcctgagagccgaagacacggctgtatattactgtgcgagagggggggttggctacggtgactcccacttcggtatggacgtctggggcctagggaccacggtcaccgtctcctca

SEQ ID NO: 679 - DNA, 369 bp, Homo sapiens
gaggtgcagctggtggagtctgggggaggcttggtccagcctggggggtccctgagactctcctgtgcagcctctggattcacctttagtagctattggatgatctgggtccgccaggctccagggaaggggctggagtgggtggccaacataaaccaagatggaagtgagaaatactatgtggactctgtgaagggccgattcaccatctccagagacaacgccaagaactcactgtatctgcaaatgaacagcctgagagccgaggacacggctgtgtattactgtgcgagaggaggtgatgactacagtaactcccactacggtatggacgtctcgggccaagggaccacggtcaccgtctcctca

SEQ ID NO: 680 - DNA, 369 bp, Homo sapiens
gaggtgcagctggtggagtctgggggaggcttggtccagcctggggggtccctgagactctcctgtgcagcctctggattcacctttagtagctattggatgaactgggtccgccaggctccagggaaggggctggagtgggtggccaacataaaccaagatggaagtgagaaatactatgtggactctgtgcagggccgattcaccatctccagagacaatgccaataactcactgtatctgcaaatgaacagcctgagagccgaggacacggctgtgtattactgtgcgagaggggggtttggctacggtgactcccactacggtatggacgtctggggccaagggaccacggtcaccgtctcctca

SEQ ID NO: 681 - DNA, 369 bp, Homo sapiens
gaggtgcagctggtggagtctgggggaggcttggtccagcctggggggtccctgagactctcctgtggagcctctggattcacctttagtagttattggatgttctggttccgccaggctccaggaaaggagctggagtgggtggccaatgttaaccaagatggaagtgagaaatactatgtggactctgtggagggccgattcaccatctccagagacaacgccaagaactcactgtatctgcaaatgaacagcctgagagccgaggacacggctatttattactgtgcgagaggaggtgagggctacagtgattcccactacggtacggacgtctggggccaagggaccacggtcaccgtctcctca

SEQ ID NO: 682 - DNA, 369 bp, Homo sapiens
caggtgcagctggtggagtctgggggaggcttggtccagcctggggggtccctgagactctcctgtgcagcctctggattcacctttagtaactattggatgaactgggtccgccaggctccagggaaggggctggagtgggtggccaatataaaggaagatggaagtgagaaatactatgtggactctgtggagggccgattcaccatctccagagacaacgccaggaactcactgtatctgcaaatgaacagtctgagagccgaggacacggctgtgtattactgtgcgagagggggggagggctacggtgactcccactacggtatggacgtctcgggccaagggaccacggtcactgtctcttca

SEQ ID NO: 683 - DNA, 369 bp, Homo sapiens
caggtgcagctggtggagtctgggggaggcttggtccagcctggggggtccctgagactctcctgtgcagcctctggattcacctttagtagttattggatgaactgggtccgccaggctccagggaaggggctggagtgggtggccaacataaagcaagatggaagtgagaaatactatgtggactctgtgaagggccgattcaccatctccagagacaacgccaagaactcactttatctgcaaatgaacagcctgacagccgaggacacggctgtgtattattgtgcgagagggggggagggctacggtgacgaccactacggtatggacgtctggggccaagggaccacggtcactgtctcttca

SEQ ID NO: 684 - DNA, 369 bp, Homo sapiens
caggtgcagctggtggagtctgggggaggcttggtccagcctggggggtccctgagactctcctgtgcagcctctggattcacctttagtagctattggatgagctgggtccgccaggctccagggaaggggctggagtgggtggccaacataaagcaagatggaagtgagaaatactatgtggactctgtgaagggccgattcaccatctccagagacaacgccaagaactcactgtatctgcaaatgaacagcctgagagccgaggacacggctgtgtattactgtgcgagagggggggagggctacggtgactaccactacggtttggacgtctcgggccaagggaccacggtcaccgtctcctca

SEQ ID NO: 685 - DNA, 369 bp, Homo sapiens
gaggtgcagctggtggagtctgggggaggcttggtccagcctggggggtccctgagactctcctgtgcagcctctggattcacctttagtagctattggatgaactgggtccgccaggctccagggaaggggctggagtgggtggccaacataaagcaagatggaagtgagaaatactatgtggactctgtgaagggccgattcaccatctccagagacaacgccaagaactcactgtatctgcaaatgaacagcctgagagccgaggacacggctgtgtattactgtgcgagagggggggacagctatggttacagggactacggtatggacgtctggggccaagggaccacggtcaccgtctcctca

SEQ ID NO: 686 - DNA, 369 bp, Homo sapiens
gaggtgcagctggtggagtctgggggaggcttggtccagcctggggggtccctgagactctcctgtgtagcctctggattcacctttagtacccattggatgaactgggcccgccaggctccagggaaggagctggaatgggtggccaacataaaccaagatggaagtgagaaatactatgtggactctgtggagggccgattcaccatctccagagacaacgccaacaattcactgtatctgcaaatgaacagcctgagagccgaagacacggctgtatattactgtgcgagagggggggttggctacggtgactcccacttcggtatggacgtctggggcctagggaccacggtcactgtctcctca

SEQ ID NO: 687 - DNA, 369 bp, Homo sapiens
gaggtgcagctggtggagtctgggggaggcttggtccagcctggggggtccctgagactctcctgtggagcctctggattcacctttagtagttattggatgctctggttccgccaggctccaggagaggggctggagtgggtggccaacataaaccaagatggaagtgagaaatactatgtggactctgtggagggccgactcaccatctccagagacaacgccaagaacgctctgtatctgcaaatgaacagcctgagagccgaggacacggctatttattactgtgcgagaggaggtgaaggctacagtgattcccaccacggtacggacgtctggggccaagggaccacggtcactgtctcttca

SEQ ID NO: 688 - DNA, 369 bp, Homo sapiens
gaggtgcagctggtggagtctgggggaggcttggtccagcctggggggtccctgagactctcctgtgcagcctctggattcacctttagtaactattggatgaactgggtccgccaggctccagggaaggggctggagtgggtggccaacataaagcaagatggaagtgagaaatactatgtggactctgtgaagggccgattcaccatctccagagacaacgccaagaactcactgtatctgcaaatgaacagcctgagagccgaggacacggctgtgtattactgtgcgagagggggggacaactatgcttacagggacttcggtatggacgtctggggccaagggaccacggtcactgtctcttca

SEQ ID NO: 689 - DNA, 369 bp, Homo sapiens
gaggtgcagctggtggagtctgggggaggcttggtccagcctggggggtccctgagactctcctgtggagcctctggattcacctttagtaattattggatgttctggttccgccaggctccaggaaaggagctggagtgggtggccaatgttaaccaagatggaagtgagaaatactatgtggactctgtggagggccgattcaccatctccagagacaacgccaagaactcactgtatctgcaaatgaacagcctgagagccgaggacacggctatttattactgtgcgagaggaggtgagggctacagtgattcccactacggtacggacgtctggggccaagggaccacggtcactgtctcttca

SEQ ID NO: 690 - DNA, 369 bp, Homo sapiens
gaggtgcagctggtggagtctgggggaggcttggtccagcctggggggtccctgagactctcctgtgcagcctctggattcacctttagtagctattggatgaactgggtccgccaggctccagggaaggggctggagtgggtggccaacataaaccaagatggaagtgagaaatactatgtggactctgtgaagggccgattcaccatctccagagacaacgccaagaactcactgtatctgcaaatgaacagcctgagagccgaggacacggctgtgtattactgtgcgagagggggggaagagtatgggagctcgcactacggtatggacgtctggggcctggggaccacggtcactgtctcctca

SEQ ID NO: 691 - DNA, 369 bp, Homo sapiens
gaggtgcagctggtggagtctgggggaggcttggtccagcctggggggtccctgagactctcctgtgcagcctctggattcacctttagtagctattggatgaactgggtccgccaggctccagggaaggggctggagtgggtggccaacataaaccaagatggaagtgagaaatactatgtggactctgtgaagggccgattcaccatctccagagacaacgccaagaactcactgtatctgcaaatgaacagcctgagagccgaggacacggctgtgtattattgtgcgagagggggggacagctatggttacagggactacggtatggacgtctggggccaagggaccacggtcactgtctcttca

SEQ ID NO: 692 - DNA, 369 bp, Homo sapiens
gaggtgcagctggtggagtctgggggaggcttggtccagccgggggggtccctaagactctcctgtgcagcctctggattcacctttagtagttattggatgaactgggtccgccagactccagggaaggggctggagtgggtggccaacataaatcaaaatggaagtgagaaatactatgtggactctgtggagggccgattcaacatctccagagacaacgccaagaactcactgtatctacaaatgagtagcctgagagccgaggacacggctgtgtattactgtgcgagaggggggtttggctacggtgattcccactacggtatggacgtctggggccaagggaccacggtcactgtctcttca

SEQ ID NO: 693 - DNA, 369 bp, Homo sapiens
gaggtgcagctggtggagtctgggggaggcttggtccaggcgggggggtccctaagactctcctgtgtagcctctggattcacctttagtaattattggatgacctggttccgccaggctccagggaaggggctggagtgggtggccaacataaaccaagatgaaagtgaggaatactatgtggactctgtgaagggccgtttcaccatctccagagacaacgccaagaactcactgtttctgcaaatgaacagcctgagagccgaggacacggctatttattactgtgcgagaggaggtgatggctacagtgactcccactacggtacggacgtctggggccaagggaccacggtcactgtctcttca

SEQ ID NO: 694 - DNA, 369 bp, Homo sapiens
caggtgcagctgcaggagtcggggggaggcttggtccagcctggggggtccctgagactctcctgtacagcctctggattcacctttagtaattattggatgaactgggtccgccaggctccagggaaggggctggagtgggtggccaacataaaggaagatggaagtgagaattactatgtggactctgtgaagggccgattcaccatctccagagacaacgccaagaactcactgtatctgcaaatgaacagcctgagagccgaggacacggctgtttattactgtgcgagagggggggaaggctatagcacctcgcactacggtatggacgtctggggccaagggaccacggtcaccgtctcttca

SEQ ID NO: 695 - DNA, 369 bp, Homo sapiens
caggtgcagctggtggagtctgggggaggcttggtccagcctggggggtccctgagactctcctgtgcagcctctggattcacctttagtaactattggatgaactgggtccgccaggctccagggaaggggctggagtgggtggccaacattaagcaagatggaagtgagaaatactatgtggactctgtggagggccgattcaccatctccagagacaacgccaagaactcactgtatctgcaaatggacagcctgagagccgaggacacggctgtttattactgtgcgagagggggggagggctacggtgaatcccactacggtatggacgtctcgggccaagggaccacggtcaccgtctcttca

SEQ ID NO: 696 - DNA, 369 bp, Homo sapiens
gaggtgcagctggtggagtctgggggaggcttggtccagcctggggggtccctgagactctcctgtgcagcctctggattcacctttagtacctattggatgaactgggtccgccaggctccagggaaggggctggagtgggtggccaacataaaacaagatggaagtgagaaatactatgtggactctgtgaagggccgattcaccatctccagagacaacgccaagaactcactgtatctgcaaatgaacagcctgagagccgaggacacggctgtgtattactgtgcgagagggggggacagctatggttacagggactacggtatggacgtctggggccaagggaccacggtcactgtctcctca

SEQ ID NO: 697 - DNA, 369 bp, Homo sapiens
gaggtgcagctggtggagtctgggggaggcttggtccagcctggggggtccctgagactctcctgtgcagcctctggattcacctttagttactattggatgatctggttccgccaggctccaggtgaggagctggagtgggtggccaacataaaccaagatggaagtgagaaatactatgtggactctgtgaagggccgattcattatctccagagacaacgccacgaactcactgtttctgcaaatgaacagcctgagagccgaggacacggctgtttattactgtgcgagaggaggtgatggctacagtaattcccacttcggtatggacgtctggggccaagggaccacggtcaccgtctcttca

SEQ ID NO: 698 - DNA, 369 bp, Homo sapiens
gaggtgcagctggtggagtctgggggaggcttggtccagcctggggggtccctgagactctcctgtgcagcctctggattcacctttagtaactattggatgatctggtaccgccaggctccaggtgaggagctggagtgggtggccaacataaaccaagatggaagtgagaaatactatgtggactctgtgaagggccgattcaccatctccagagacaacgccaagaactcactgtatctgcaaatgaacagcctgagagccgaggacacggctatttattactgtgcgagaggaggtgagggctacagtgattcccactacggtacggacgtctggggccaggggaccacggtcactgtctcttca

SEQ ID NO: 699 - DNA, 369 bp, Homo sapiens
gaggtgcagctggtggagtctgggggaggcttggtccagcctggggggtccctgagactctcctgtgcagcctctggattcacctttagtaactattggatgaactgggtccgccaggctccagggaaggagctggagtgggtggccaacataaaccaagatgaaagtgaaaaatactatgttgactctgtgaagggccgtttcaccgtctccagagacaacgccaagaactcactgtttctgcaaatgaacagcctgagagccgacgacacggctgtatattactgtgcgagaggggggtttggctacggtgactcccacttcggtatggacgtctggggccaagggaccacggtcaccgtctcttca

SEQ ID NO: 700 - DNA, 369 bp, Homo sapiens
gaggtgcagctggtggagtctgggggaggcttggtccagcctggggggtccctgagactctcctgtggagcctctggattcacctttagtaattattggatgttctggttccgccaggctccaggaaaggagctggagtgggtggccaatgttaaccaagatggaagtgagaaatactatgtggactctgtggagggccgattcaccatctccagagacgacgccaagaactcactgtatctgcaaatgaacagcctgagagccgaggacacggctatttattactgtgcgagaggaggtgagggctacagtgattcccactacggtacggacgtctggggccaagggaccacggtcactgtctcttca

SEQ ID NO: 701 - DNA, 369 bp, Homo sapiens
gaggtgcagctggtggagtctgggggaggcttggtccagcctggggggtccctgagactctcctgtggagcctctggattcacctttagtaattattggatgttctggttccgccaggctccaggaaaggagctggagtgggtggccaatgttaaccaaaatggaagtgagaaatactatgtggactctgtggagggccgattcaccatctccagagacaacgccaagaactcactgtatctgcaaatgaacagcctgagagccgaggacacggctatttattactgtgcgagaggaggtgagggctacagtgattcccactacggtacggacgtctggggccaagggaccacggtcactgtctcctca

SEQ ID NO: 702 - DNA, 369 bp, Homo sapiens
caggtgcagctggtggagtctgggggaggcttggtccagcctggggggtccctgagactctcctgtgcagcctctggattcacctttagtaactattggatgaactgggtccgccaggctccagggaaggggctggagtgggtggccaacataaagcaagatggaagtgagaaatactatgtggactctgtgaagggccgattcaccatctccagagacaacgccaaggactcactgtatctgcaaatgaacagcctgagagccgaggacacggctatttattattgtgcgagagggggggagggttacggtgactcccactacggtatggacgtctcgggccaagggaccacggtcaccgtctcctca

SEQ ID NO: 703 - DNA, 369 bp, Homo sapiens
gaggtgcagctggtggagtctgggggaggcttggtccagcctggggggtccctgagactctcctgtgcagcctctggattcacctttagtaactattggatgatctggtaccgccaggctccaggtgaggagctggagtgggtggccaacataaaccaagatggaagtgagaaatactatgtggactctgtgaagggccgattcaccatctccagagacaacgccacgaactcactgtttctgcaaatgaacagcctgagagccgaggacacggctgtttattactgtgcgagaggaggtgatggctacagtaattcccactacggtatggacgtctggggccaagggaccacggtcactgtctcctca

SEQ ID NO: 704 - DNA, 369 bp, Homo sapiens
gaggtgcagctggtggagtctgggggaggcttggtccagcctggggggtccctgagactctcctgtgcagcctctggattcacctttagtgactattggatgatctggtaccgccaggctccaggtgaggagctggagtgggtggccaacataaaccaagatggaagtgagaaatactatgtggactctgtgaagggccgattcaccatctccagagacaacgccacgaactcactgtttctgcaaatgaacagcctgagagccgaggacacggctgtttattactgtgcgagaggaggtgatggctacagtaattcccactacggtatggacgtctggggccaagggaccacggtcaccgtctcctca

SEQ ID NO: 705 - DNA, 369 bp, Homo sapiens
gaggtgcagctggtggagtctgggggaggcttggtccagcctggggggtccctgagactctcctgtgcagcctctggattcacctttagtaaatattggatgatctgggtccgccaggctccagaaaaggggctggagtgggtggccaacataaaccaagatggaagtgagaaatactatgtggactctgtggagggccgattcaccatttccagagacaatgtcaataactcattgtatctgcaaatgaacagcctgagagccgaggacacggctgtgtactactgtgcgagaggaggtgatgactacagtaactcccactacggtatggacgtctcgggccaagggaccacggtcactgtctcctca

SEQ ID NO: 706 - DNA, 369 bp, Homo sapiens
gaggtgcagctggtggagtctgggggaggcttggtccagcctggggggtccctgagactctcctgtgcagcctctggattcacctttagtaactattggatgagctgggtccgccaggctccagggagggggctggagtgggtggccaacataaaccaagatggaagtgagaaatactatgtggactctgtgaagggccgattcaccatctccagagacaacgccaagagctcactgtatctgcaaatgaacagccttagagccgaggacacggctgtttattactgtgcgagagggggggaagaatatagcagctcccactacggtatggacgtctggggccaagggaccacggtcactgtctcctca

SEQ ID NO: 707 - DNA, 369 bp, Homo sapiens
gaggtgcagctggtggagtctgggggaggcttggtccagcctggggggtccctgagactctcctgtatagcctctggattcagctttagtaactattggatgaactgggtccgccaggctccagggaaggggctggagtgggtggccaacataaagcaagatggaagtgagaattactatgtggactctgtgaagggccgattcaccatctccagagacaacgccaagaactcactgtatctgcaaatgaacagcctgagagccgaggacacggctgtgtattactgtgcgagagggggggaagggtatagcacctcgcactacggtatggacgtctggggccaagggaccgcggtcactgtctcttca

SEQ ID NO: 708 - DNA, 369 bp, Homo sapiens
caggtgcagctggtggagtctgggggaggcttggtccagcctggggggtccctgagactctcctgtgcagcctctggattcacctttagtagctattggatgagctgggtccgccaggctccagggaaggggctggagtgggtggccaacataaagcaagatggaagtgagaaatactatgtggactctgtgaagggccgattcaccatctccagagacaacgccaagaactcactgtatctgcaaatgagcagcctgagagccgaggacacggctgtgtatttctgtgcgagagggggggaaggctatggtgtcgaccactacggtttggacgtctcgggccaagggaccacggtcaccgtctcctca

SEQ ID NO: 709 - DNA, 369 bp, Homo sapiens
gaggtgcagctggtggagtctgggggaggcttggtccagcctggggggtccctgagactctcctgtggagcctctggattcacctttagtagctattggatgctctggttccgccaggctccaggaaaggagctggagtgggtggccaatgttaaccaagatggcagtgagaattactatgtggactctgtggagggccgattcaccatctccagagacaacgccaagaactcactgtatctgcaaatgcacagcctgagagccgaggacacggctgtatattactgtgcgagaggaggtgaagactacggtaactcccacttcggcatggacgtctggggccaagggaccatggtcaccgtctcctca

SEQ ID NO: 710 - DNA, 369 bp, Homo sapiens
gaggtgcagctggtggagtctgggggaggcttggtgcagcctggcagatccctgagactctcttgtgcagcctctggattcacctttagtaactattggatgatctggtaccgccaggctccaggtgaggagctggagtgggtggccaacataaaccaagatggaagtgagaaatactatgtggactctgtgaagggccgattcaccatctccagagacaacgccacgaactcactgtttctgcaaatgaacagcctgagagccgaggacacggctgtttattactgtgcgagaggaggtgatggctacagtaattcccactacggtatggacgtctggggccaagggaccacggtcactgtctcttca

SEQ ID NO: 711 - DNA, 369 bp, Homo sapiens
gaggtgcagctggtggagtctgggggaggcttggtcaagcctggagggtccctgagactctcctgtgcagcctctggattcacctttagtaactattggatgatctggtaccgccaggctccaggtgaggagctggagtgggtggccaacataaaccaagatggaagtgagaaatactatgtggactctgtgaagggccgattcaccatctccagagacaacgccacgaactcactgtttctgcaaatgaacagcctgagagccgaggacacggctgtttattactgtgcgagaggaggtgatggctacagtaattcccactacggtatggacgtctggggccaagggaccacggtcaccgtctcctca

SEQ ID NO: 712 - DNA, 369 bp, Homo sapiens
gaggtgcagctggtggagtctgggggaggcttggtccagattggggggtccctgagactctcctgtgcagcctccggattcacctttagtaaatattggatgatctgggtccgccaggctccagaaaaggggctggagtgggtggccaacataaaccaagatggaagtgagaaatactatgtggactctgtggagggccgattcaccatttccagagacaacgccaataactcactgtttctgcaaatgaacagcctgagagccgaggacacggctgtgtactactgtgcgagaggaggtgatgactacagtatctcccacttcggtatggacgtctcgggccaagggaccagggtcaccgtctcctca

SEQ ID NO: 713 - DNA, 369 bp, Homo sapiens
gaggtgcagctggtggagtctgggggaggcttggtccagattggggggtccctgagactctcctgtgtagcctctggattcacctttagtaaatattggatgatctgggtccgccaggctccagaaaaggggctggagtgggtggccaacataaaccaagatggaagtgagaaatactatgtggactctgtggagggccgattcaccatttccagagacaacgccaataattcattgtatctgcagatgaacagcctgagagccgaggacacggctgtgtactactgtgcgagaggaggtgatgactacagtcactcccactacggtatggacgtctcgggccaagggaccacggtcactgtctcttca

SEQ ID NO: 714 - DNA, 369 bp, Homo sapiens
gaggtgcagctggtggagtctgggggaggcttggtccagcctggggggtccctgagactctcctgtgcagcctctggattcaactttagtaactattggatgaactgggtccgccaggctccagggaaggagctggagtgggtggccaacataaaccaagatggaagtgagaaatactatgtggactctgtgaagggccgattcaccatctccagagacaacgccaagaactcactgtttctgcaaatgaacagcctgagagccgacgacacggctgtgtattactgtgcgagaggggggtttggctacggtgactcccactacggtatggacgtctggggccaagggaccacggtcaccgtctcctca

SEQ ID NO: 715 - DNA, 369 bp, Homo sapiens
gaggtgcagctggtggagtctgggggaggcttggtccagcctggggggtccctgagactctcctgtgcagcctctggattcacctttggtagttattggctgaattgggtccgccaggctccagggaaggggctggagtgggtggccaacataaaccaagatggcagtgagaattactatgtggactctgtggagggccgattcaccatctccagagacaacgccaagaactcactgtatctgcaaatgcacagcctgagagccgaggacacggctgtatattactgtgcgagaggaggtgaagactacggtaactcccacttcggcatggacgtctggggccaagggaccatggtcactgtctcttca

SEQ ID NO: 716 - DNA, 369 bp, Homo sapiens
caggtgcagctggtggagtctgggggaggcttggtcaagcctggagggtccctgagactctcctgtgcagcctctggattcacctttagtagctattggatgagctgggtccgccaggctccagggaaggggctggagtgggtggccaacataaagcaagatggaagtgagaaatactatgtggactctgtgaagggccgattcaccatctccagagacaacgccaagaactcactgtatctgcaaatgagcagcctgagagccgaggacacggctgtgtatttctgtgcgagagggggggaaggctatggtgtcgaccactacggtttggacgtctcgggccaagggaccacggtcactgtctcttca

SEQ ID NO: 717 - DNA, 369 bp, Homo sapiens
caggtgcagctggtggagtctgggggaggcttggtccagcctggggggtccctgagactctcctgtacagcctctggattcacctttagtgactattggatgaactgggtccgccaggctccaggtaaggggctggagtgggtggccaatataaaggaagatggaagtgagaaatactatgtggactctgtggagggccgattcaccatctccagagacaacgccaggaactcactgtatctgcaaatgaccagcctgagagaagaagacacggctatgtattactgtgcgagagggggggagggctacggtgacaaccactacggtatggacgtctcgggccaagggaccacggtcactgtctcttca

SEQ ID NO: 718 - DNA, 369 bp, Homo sapiens
gaggtgcagctggtggagtctgggggaggcttggtccagcctggggggtccctgagactctcctgtgcagcctctggattcacctttagaagctattggatgaactgggtccgccaggctccagggaaggaggcggaatgggtggccaacataaaccaagatggaagtgagaaatattatgtggactctgtggagggccgattcaccatctccagagacaacgccaagaactcactgtttctgcaaatgaacagcctgagagacgaggacacggctgtttattactgtgcgagaggaggccccgactacggtgacctccactacggtatggacgtctggggccaagggaccacggtcaccgtctcctca

SEQ ID NO: 719 - DNA, 369 bp, Homo sapiens
caggtgcagctggtggagtctgggggaggcttggtccagcctggggggtccctaagactctcctgtgcagcctctggattcacctttagtaggtattggatgagctgggtccgccaggctccagggaaggggctggagcgggtggccaacataaaccaagatggacgtgagaaatactatgtggactctgtgaagggccgattcaccatctccagagacaacgccaagaactcactgtatctgcaaatgaacagcctgagagccgaggacacggctgtgtattattgtgcgagagggggggagggctacggtgactaccactacggtatggacgtctcgggccaagggaccacggtcactgtctcttca

SEQ ID NO: 720 - DNA, 369 bp, Homo sapiens
gaggtgcagctggtggagtctgggggaggcttggtccagcctggggggtccccgagactctcctgtgcagcctctggattcacccttagtaactattggatgatctggtaccgccaggctccaggtgagaagctggagtgggtggccaacataaaccaagatggaagtgagaaatactatgtggactctgtgaagggccgattcaccatctccagagacaacgccacgaactcactgtttctgcaaatgaacagcctgagagccgaggacacggctgtttattactgtgcgagaggaggtgatggctacagtaattcccactacggtatggacgtctggggccaagggaccacggtcaccgtctcctca

SEQ ID NO: 721 - DNA, 369 bp, Homo sapiens
gaggtgcagctggtggagtctgggggaggcttggtccagcctggggggtccctgagactctcctgtgtagcctctggattcaacttcagtaactattggatgaactgggtccgccaggctccagggaaggagctggagtgggtggccaacataaaccaagatgaaagtgaaaaatactatgtagactctgtgaagggccgattcaccatctccagagacaacgccaagaactcactgtttctgcaaatgaacagcctgagagccgacgacacggctgtgtattactgtgcgagaggggggtttggctacggtgactcccacttcggtatggacgtctggggccaagggaccacggtcaccgtctcctca

SEQ ID NO: 722 - DNA, 369 bp, Homo sapiens
gaggtgcagctggtggagtctgggggaggcttggtccagcctggggggtccctgagactctcctgtgcagcctctggattcaattttagtaactattggatgaactgggtccgtcaggctccagggaaggagctggagtgggtggccaacataaaccaagatgaaagtgaaaaatactatgtagactctgtgaagggccgattcaccattttcagagacaacgccaagaactcactgtttctgcaaatgaacagcctgagagccgacgacacggctgtgtattactgtgcgagaggggggtttggctacggtgactcccacttcggtatggacgtctggggccaagggaccacggtcactgtctcttca

SEQ ID NO: 723 - DNA, 369 bp, Homo sapiens
gaggtgcagctggtggagtctgggggaggcttggtccagcctggggggtccctgagtctctcctgtgcagcctctggattcacctttagaagcttttggatgaactgggtccgccaggctccagggaaggaggcggaatgggtggccaacataaatcaagatggaagtgagaaatactatgtggactctgtgaagggccgattcaccatctccagagacaacgccaagaactcactgtttctgcaaatgaacagcctgagagccgaggacacggctgtttattactgtgcgagaggaggccccgactacggtgacctccactacggtatggacgtctggggccaagggaccacggtcactgtctcttca

SEQ ID NO: 724 - DNA, 369 bp, Homo sapiens
gaggtgcagctggtggagtctgggggaggcttggtccagcctggggggtccctgagactctcctgtgcagcctctggattcacctttagaagctattggatgaactgggtccgccaggctccagggaaggaggcggaatgggtggccaacataaaccaagatggaagtgagaaatattatgtggactctgtgaagggccgattcaccatctccagagacaacgccaagaactcactgtttctgcaaatgaacagcctgagagacgaggacacggctgtttattactgtgcgagaggaggccccgactacggtgacctccactacggtatggacgtctggggccaagggaccacggtcactgtctcttca

SEQ ID NO: 725 - DNA, 369 bp, Homo sapiens
gaggtgcagctggtggagtctgggggaggcttggtccagcctggggggtccctgagactctcctgtgcagcctctggattcacctttagtaactattggatgatctggtaccgccaggctccaggtgaggagctggagtgggtggccaacataaaccaagatggaagtgagaaatactatgtggactctgtgaagggccgattcaccatctccagagacaacgccaagaactcactgtatctgcaaatgcacagcctgagagccgaggacacggctgtatattactgtgcgagaggaggtgaagactacggtaactcccactacggcatggacgtctggggccaagggaccatggtcaccgtctcttca

SEQ ID NO: 726 - DNA, 369 bp, Homo sapiens
gaggtgcagctggtggagtctgggggaggcttggtccagcctggggggtccctgagactctcctgtgcagcctctggattcacctttagtaactattggatgaactgggtccgccaggctccagggaaggggctggagtgggtggccaacataaaccaagatggaagtgaaagatactatgtggactctgtgaagggccgattcaccatctccagagacaacgccaagagctcactgtatctgcaaatgaacagcctgagagccgaggacacggctgtgtatttctgtgcgagagggggggaaggctatggtatcgaccactacggtttggacgtctcgggccaagggaccacggtcaccgtctcctca

SEQ ID NO: 727 - DNA, 369 bp, Homo sapiens
caggtgcagctggtggagtctgggggaggcttggtccagcctggggggtccctgagactctcctgtgcagcctctggattcacctttagtagctattggatgagctgggtccgccaggctccagggaaggggctggagtgggtggccaacataaatcaagatggaagtgaaagatactatgtggactctgtgaagggccgattcaccatctccagagacaacgccaagagctcactgtatctgcaaatgagtagcctgagagccgaggacacggctgtgtatttctgtgcgagagggggggaaggctatggtgtcgaccactacggtttggacgtctcgggccaagggaccacggtcactgtctcctca

SEQ ID NO: 728 - DNA, 369 bp, Homo sapiens
caggtgcagctggtggagtctgggggaggcttggtccagcctggggggtccctgagactctcctgtgcagcctctggattcacctttagtaactattggatgatctgggtccgccaggctccagggaaggggctggagtgggtggccaacataaaccaagatggaagtgagaaatactatgtggactctgtggagggccgattcaccatctccagagacaacgccaagagctcactgtatctgcaaatgagcaacctgagagccgaggacacggctgtatatttctgtgcgagagggggggaaggctatggtgtcgaccactacggtttggacgtctcgggccaagggaccacggtcactgtctcttca

SEQ ID NO: 729 - DNA, 369 bp, Homo sapiens
caggtgcagctggtggagtctgggggaggcttggtccagcctggggggtccctgagactctcctgtgcagccactggattcaccttaagtaactattggatgaactgggtccgccaggctccagggaaggggctggagtgggtggccaacataaaccaagatggaagtgaaaaatactatgtggactctgtgaagggccgattcaccatctccagagacaacgccaagaactcactgtttctgcaaatgaacagcctgagagccgaggacacggctgtgtattactgtgcgagagggggaacaggctatggttccgaccactacggtatggacgtctcgggccaagggaccacggtcactgtctcttca

SEQ ID NO: 730 - DNA, 369 bp, Homo sapiens
gaggtgcagctggtggagtctgggggaggcttggtccagcctggggggtccctgagactctcctgtgcagcctctggattcaattttagtaactattggatgaactgggtccgccaggctccagggaaggagctggagtgggtggccaacataaaccaagatggaagtgagaattactatgtggactctgtgaagggccgattcaccatctccagagacaacgtcaagaactcactgtttctgcaaatgaaccgcctgagagccgacgacacggctgtgtattactgtgcgagaggggggtttggctacggtgactcccactacggtatggacgtctggggccaagggaccacggtcactgtctcctca

SEQ ID NO: 731 - DNA, 369 bp, Homo sapiens
gaggtgcagctggtggagtctgggggaggcttggtccagcctggggggtccctgagactctcctgtgcagcctctggattcacctttggtaactattggatgatctgggtccgccaggctccaggcaaggagttggagtggctggccaacataaaccaaaatggaagtgagagatactatgtggactctgtgcagggccgattcaccatctccagagacaacgccaagaactcactgtatctgcaaatgaacagcctgagagccgaggacacggctgtatattactgtgcgagagggggtgctgactacagtaactcccactacggtatggacgtcagcggccaagggaccacggtcactgtctcttca

SEQ ID NO: 732 - DNA, 369 bp, Homo sapiens
caggtgcagctggtggagtctgggggaggcttggtccagcctggggggtccctgagactctcctgtgcagcctctggattcacctttagtagctattggatgagctgggtccgccaggctccagggaaggggctggagtgggtggccaacataaaccaagatggaagtgaaagatactatgtggactctgtgaagggccgattcaccatctccagagacaacgccaacaactcactgcatctgcaaatgagcagcctgagagccgaggacacggctgtgtatttctgtgcgagagggggggaaggctatggtgtcgaccactacggtttggacgtctcgggccaagggaccacggtcaccgtctcctca

SEQ ID NO: 733 - DNA, 369 bp, Homo sapiens
gaggtgcagctggtggagtctgggggaggcttggtccagccgggggggtccctgagactctcctgtgcagcctctggattcacctttagaagttattggatgaactgggtccgccaggctccagggaaagaggcggaatgggtggccaacataaacccagatggaagtgagaaatactatgtggactctgtgcagggccgacacaccatctccagagacaacgccaagaactcactgtttctggaaatgaacagcctgagagtcgaggacacggctctttattactgtgcgagaggaggccccggctacggtgacctccactacggtatggacgtctggggccaagggaccacggtcactgtctcctca

SEQ ID NO: 734 - DNA, 369 bp, Homo sapiens
caggtgcagctggtggagtctgggggaggcttggtccagcctggggggtccctgagactctcctgtgcagccactggattcaccttaagtaactattggatgaactgggtccgccaggctccagggaaggggctggagtgggtggccaacataaatcaagatggaagtgaaaaatactatgtggactctgtggagggccgattcaccatctccagagacaacgccaagagctcactgtatctgcaaatgagcagcctgagagccgaggacacggctgtgtatttctgtgcgagagggggggaaggctatggtgtcgaccactacggtttggacgtctcgggccaagggaccacggtcactgtctcctca

SEQ ID NO: 735 - DNA, 369 bp, Homo sapiens
caggtgcagctggtggagtctgggggaggcctggtccagcctggggggtccctgagactctcctgtgcagcctctggattcaccttcagtgactactacatgagctggatccgccaggctccagggaaggggctggagtgggtggccaacataaaccaagatggaagtgaaagatactatgtggactctgtgaagggccgattcaccatctccagagacaacgccaagaactcactgtatctgcaaatgagcagcctgagagccgaggacacggctgtgtatttctgtgcgagagggggggaaggctatggtgtcgaccactacggtttggacgtctcgggccaagggaccacggtcaccgtctcttca

SEQ ID NO: 736 - DNA, 369 bp, Homo sapiens
gaggtgcagctggtggagtctgggggaggcttggtccagcctggggggtccctgagactctcctgtgcagccactggattcaccttaagtaactattggatgaactgggtccgccaggctccagggaaggggctggagtgggtggccaacataaaccaagatggaagtgaaagatactatgtggactctgtgaagggccgattcaccatctccagagacaacgccaagaactcactgtatctgcaaatgagcagcctgagagccgaggacacggctgtgtatttctgtgcgagagggggggaaggctatggtgtcgaccactacggtttggacgtctcgggccaagggaccacggtcaccgtctcttca

SEQ ID NO: 737 - DNA, 369 bp, Homo sapiens
caggtgcagctggtggagtctgggggaggcttggtccagcctggggggtccctgagactctcctgtgcagcctctggattcaccttaagtaactattggatgaactgggtccgccaggctccagggaaggggctggagtgggtggccaacataaaccaagatggaagtgaaagatactatgtggactctgtgaagggccgattcaccatctccagagacaacgccaagaactcactgtatctgcaaatgagcagcctgagagccgaggacacggctgtgtatttctgtgcgagagggggggaaggctatggtgtcgaccactacggtttggacgtctcgggccaagggaccacggtcactgtctcttca

SEQ ID NO: 738 - DNA, 369 bp, Homo sapiens
caggtgcagctggtggagtctgggggaggcttggtccagcctggggggtccctgagactctcctgtgcagccactggattcaccttaagtaactattggatgaactgggtccgccaggctccagggaaggggctggagtgggtggccaacataaaccaagatggaagtgaaagatactatgtggactctgtgaagggccgattcaccatctccagagacaacgccaagaactcactgtatctgcaaatgagcagcctgagagccgaggacacggctgtgtatttctgtgcgagagggggggaaggctatggtgtcgaccactacggtttggacgtctcgggccaagggaccacggtcactgtctcttca

SEQ ID NO: 739 - DNA, 369 bp, Homo sapiens
caggtgcagctggtggagtctgggggaggcttggtccagcctggggggtccctgagactctcctgtgcagccactggattcaccttaagtaactattggatgaactgggtccgccaggctccagggaaggggctggagtgggtggccaacataaaccaagatggaagtgaaagatactatgtggactctgtgaagggccgattcaccatctccagagacaacgccaagaactcactgtatctgcaaatgagcagcctgagagccgaggacacggctgtgtatttctgtgcgagagggggggaaggctatggtgtcaaccactacggtttggacgtctcgggccaagggaccacggtcaccgtctcttca

SEQ ID NO: 740 - DNA, 369 bp, Homo sapiens
caggtgcagctggtggagtctgggggaggcttggtcaagcctggagggtccctgagactctcctgtgtagcctctggattcaccttcagtgactactatatgagctggatccgccaggctccagggaaggggctggagtgggtggccaacataaagcaagatggaagtgaaagatactatgtggactctgtgaagggccgattcaccatctccagagacaacgccaagagctcactgtatctgcaaatgagcagcctgagagccgaggacacggctgtgtatttctgtgcgagagggggggaaggctatggtgtcgaccactacggtttggacgtctcgggccaagggaccacggtcactgtctcttca

SEQ ID NO: 741 - DNA, 369 bp, Homo sapiens
caggtgcagctggtggagtctgggggaggcttggtccagcctggggggtccctgagactctcctgtgcagccactggattcaccttaagtaactattggatgaactgggtccgccaggctccagggaaggggctggagtgggtggccaacataaaccaagatggaagtgaaagatactatgtggactctgtggagggccgattcaccatctccagagacaacgccaagagctcactgtatctgcaaatgagcaacctgagagccgaggacacggctgtatatttctgtgcgagagggggggaaggctatggtgtcgaccactacggtttggacgtctcgggccaagggaccacggtcactgtctcttca

SEQ ID NO: 742 - DNA, 369 bp, Homo sapiens
caggtgcagctggtggagtctgggggaggcttggtccagcctggggggtccctgagactctcctgtgcagccactggattcaccttaagtaactattggatgaactgggtccgccaggctccagggaaggggctggagtgggtggccaacataaaccaagatggaagtgaaagatactatgtggactctgtgaagggccgattcaccatttccagagacaacgccaagagctcactgtatctgcaaatgagcagcctgagagccgaggacacggctgtgtatttctgtgcgagagggggggaaggctatggtgtcgaccactacggtttggacgtctcgggccaagggaccacggtcaccgtctcctca

SEQ ID NO: 743 - DNA, 369 bp, Homo sapiens
caggtgcagctgcaggagtcggggggaggcttggtccagcctggggggtccctgagactctcctgtgcagccactggattcaccttaagtaactattggatgaactgggtccgccaggctccagggaaggggctggagtgggtggccaacataaaccaagatggaagtgaaagatactatgtggactctgtgaagggccgattcaccatctccagagacaacgccaagaactcactgtatctgcaaatgagcagcctgagagccgaggacacggctgtgtatttctgtgcgagagggggggaaggctatggtgtcgaccactacggtttggacgtctcgggccaagggaccacggtcactgtctcttca

SEQ ID NO: 744 - DNA, 369 bp, Homo sapiens
caggtgcagctggtggagtctgggggaggcctggtcaagcctggggggtccctgagactctcctgtgcagccactggattcaccttaagtaactattggatgaactgggtccgccaggctccagggaaggggctggagtgggtggccaacataaaccaagatggaagtgaaagatactatgtggactctgtgaagggccgattcaccatctccagagacaacgccaagaactcactgtatctgcaaatgagcagcctgagagccgaggacacggctgtgtatttctgtgcgagagggggggaaggctatggtgtcgaccactacggtttggacgtctcgggccaagggaccacggtcaccgtctcctca

SEQ ID NO: 745 - DNA, 369 bp, Homo sapiens
caggtgcagctggtggagtctgggggaggcttggtccagcctggggggtccctgagactctcctgtgcagccactggattcaccttaagtaactattggatgaactgggtccgccaggctccagggaaggggctggagtgggtggccaacataaaccaagatggaagtgaaagatactatgtggactctgtgaagggccgattcaccatctccagagacaacgccaacaactcactgcatctgcaaatgagcagcctgagagccgaggacacggctgtgtatttctgtgcgagagggggggaaggctatggtgtcgaccactacggtttggacgtctcgggccaagggaccacggtcactgtctcttca

SEQ ID NO: 746 - DNA, 369 bp, Homo sapiens
caggtgcagctgggggagtctgggggaggcttggtccagcctggggggtccctgagactctcctgtgcagccactggattcaccttaagtaactattggatgaactgggtccgccaggctccagggaaggggctggagtgggtggccaacataaaccaagatggaagtgaaagatactatgtggactctgtggagggccgattcaccatctccagagacaacgccaagagctcactgtatctgcaaatgagcaacctgagagccgaggacacggctgtatatttctgtgcgagagggggggaaggctatggtgtcgaccactacggtttggacgtctcgggccaagggaccacggtcaccgtctcctca

SEQ ID NO: 747 - DNA, 369 bp, Homo sapiens
caggtgcagctggtggagtctgggggaggcttggtccagcctggggggtccctgaaactctcctgtgcagccactggattcaccttaagtaactattggatgaactgggtccgccaggctccagggaaggggctggagtgggtggccaacataaaccaagatggaagtgaaagatactatgtggactctgtgaagggccgattcaccatttccagagacaacgccaagagctcactgtatctgcaaatgagcagcctgagagccgaggacacggctgtgtatttctgtgcgagagggggggaaggctatggtgtcgaccactacggtttggacgtctcgggccaagggaccacggtcactgtctcttca

SEQ ID NO: 748 - DNA, 369 bp, Homo sapiens
caggtgcagctgcaggagtcggggggaggcttggtccagcctggggggtccctgagactctcctgtgcagccactggattcaccttaagtaactattggatgaactgggtccgccaggctccagggaaggggctggagtgggtggccaacataaaccaagatggaagtgaaagatactatgtggactctgtgaagggccgattcaccatctccagaggcaacgccaagaactcactgtatctgcaaatgagcagcctgagagccgaggacacggctgtgtatttctgtgcgagagggggggaaggctatggtgtcgaccactacggtttggacgtctcgggccaagggaccacggtcactgtctcttca

SEQ ID NO: 749 - DNA, 369 bp, Homo sapiens
caggtgcagctggtggagtctgggggaggcgtggtccagcctgggaggtccctgagactctcctgtgcagcctctggattcacctttgatgattatggcatgagctgggtccgccaggctccagggaaggggctggagtgggtggccaacataaaccaagatggaagtgaaagatactatgtggactctgtgaagggccgattcaccatctccagagacaacgccaagaactcactgtatctgcaaatgagcagcctgagagccgaggacacggctgtgtatttctgtgcgagagggggggaaggctatggtgtcgaccactacggtttggacgtctcgggccaagggaccacggtcactgtctcttca

SEQ ID NO: 750 - DNA, 369 bp, Homo sapiens
gaggtgcagctggtggagtctgggggaggcttggtccagccgggggggtccctgagactctcctgtgcagcctctggattcacctttagtagccattggatgacttgggtccgtcaggctccagggaaggggctggagtgggtggcccacataaaggaagacggaagtgagaaatactatgaggactctgtggagggccgattcaccgtctccagagacaacgccaagaactcggtatatctgcaaatgaacagtctgagagccgaagacacggctgtgtattactgtgcgagaggaggtgatggctacagtgactcccacttcggtgtggacgtctggggccaagggaccacggtcaccgtctcctca

SEQ ID NO: 751 - DNA, 369 bp, Homo sapiens
gaggtgcagctggtggagtctgggggaggcttggtccagccgggggggtccctgagactctcctgtgcagcctctggattcacctttagtagccattggatgacttggttccgtcaggctccagggaaggggctggagtgggtggcccacataaaggaagacggaagtgagaaatactatgtggactctgtgaagggccgattcaccgtctccagagacaacgccaagaactcggtatatctgcaaatgaacagtctgagagccgaagacacggctgtgtattactgtgcgagaggaggtgatggctacagtgactcccacttcggtgtggacgtctggggccaagggaccacggtcaccgtctcctca

SEQ ID NO: 752 - DNA, 369 bp, Homo sapiens
gaggtgcagctggtggagtctgggggaggcttggtccagccgggggggtccctgagactctcctgtgcagcctctggattcacctttagtagccattggatgacttggttccgtcaggctccagggaaggggctggagtgggtggcccacataaaggaagacggaagtgagaaatactatgaggactctgtgaagggccgattcaccgtctccagagacaacgccaagaactcggtatatctgcaaatgaacagtctgagagccgaagacacggctgtgtattactgtgcgagaggaggtgatggctacagtgactcccacttcggtgtggacgtctggggccaagggaccacggtcaccgtctcctca

SEQ ID NO: 753 - DNA, 369 bp, Homo sapiens
gaggtgcagctggtggagtctgggggaggcttggtccagccgggggggtccctgagactctcctgtgcagcctctggattcacctttagtagccattggatgacttggttccgtcaggctccagggaaggggctggagtgggtggcccacataaaggaagacggaagtgagaaatactatgaggactctgtggagggccgattcaccatctccagagacaacgccaagaactcggtatatctgcaaatgaacagtctgagagccgaagacacggctgtgtattactgtgcgagaggaggtgatggctacagtgactcccacttcggtgtggacgtctggggccaagggaccacggtcaccgtctcctca

SEQ ID NO: 754 - DNA, 369 bp, Homo sapiens
gaggtgcagctggtggagtctgggggaggcttggtccagccgggggggtccctgagactctcctgtgcagcctctggattcacctttagtagccattggatgacttggttccgtcaggctccagggaaggggctggagtgggtggcccacataaaggaagacggaagtgagaaatactatgaggactctgtggagggccgattcaccgtctccagagacaacgccaagaactcgttatatctgcaaatgaacagtctgagagccgaagacacggctgtgtattactgtgcgagaggaggtgatggctacagtgactcccacttcggtgtggacgtctggggccaagggaccacggtcaccgtctcctca

SEQ ID NO: 755 - DNA, 369 bp, Homo sapiens
gaggtgcagctggtggagtctgggggaggcttggtccagccgggggggtccctgagactctcctgtgcagcctctggattcacctttagtagccattggatgacttgggtccgtcaggctccagggaaggggctggagtgggtggcccacataaaggaagacggaagtgagaaatactatgtggactctgtgaagggccgattcaccatctccagagacaacgccaagaactcgttatatctgcaaatgaacagtctgagagccgaagacacggctgtgtattactgtgcgagaggaggtgatggctacagtgactcccacttcggtgtggacgtctggggccaagggaccacggtcaccgtctcctca

SEQ ID NO: 756 - DNA, 369 bp, Homo sapiens
gaggtgcagctggtggagtctgggggaggcttggtccagccgggggggtccctgagactctcctgtgcagcctctggattcacctttagtagccattggatgacttggttccgtcaggctccagggaaggggctggagtgggtggcccacataaaggaagacggaagtgagaaatactatgtggactctgtgaagggccgattcaccatctccagagacaacgccaagaactcgttatatctgcaaatgaacagtctgagagccgaagacacggctgtgtattactgtgcgagaggaggtgatggctacagtgactcccacttcggtgtggacgtctggggccaagggaccacggtcaccgtctcctca

SEQ ID NO: 757 - DNA, 369 bp, Homo sapiens
gaggtgcagctggtggagtctgggggaggcttggtccagccgggggggtccctgagactctcctgtgcagcctctggattcacctttagtagccattggatgacttgggtccgtcaggctccagggaaggggctggagtgggtggcccacataaaggaagacgaaagtgagaaatactatgtggactctgtgaagggccgattcaccatctccagagacaacgccaagaactcgttatatctgcaaatgaacagtctgagagccgaagacacggctgtgtattactgtgcgagaggaggtgttggctacagtatctcccacttcggtgtggacgtctggggccaagggaccacggtcaccgtctcctca

SEQ ID NO: 758 - DNA, 369 bp, Homo sapiens
gaggtgcagctggtggagtctgggggaggcttggtccagccgggggggtccctgagactctcctgtgcagcctctggattcacctttagtagccattggatgacttgggtccgtcaggctccagggaaggggctggagtgggtggcccacataaaggaagacgaaagtgagaaatactatgtggactctgtgaagggccgattcaccatctccagagacaacgccaagaactcgttatatctgcaaatgaacagtctgagagccgaagacacggctgtgtattactgtgcgagaggaggtgagggctacagtatctcccacttcggtgtggacgtctggggccaagggaccacggtcaccgtctcctca

SEQ ID NO: 759 - DNA, 369 bp, Homo sapiens
gaggtgcagctggtggagtctgggggaggcttggtccagccgggggggtccctgagactctcctgtgcagcctctggattcacctttagtagccattggatgacttggttccgtcaggctccagggaaggggctggagtgggtggcccacataaaggaagacgaaagtgagaaatactatgtggactctgtgaagggccgattcaccatctccagagacaacgccaagaactcgttatatctgcaaatgaacagtctgagagccgaagacacggctgtgtattactgtgcgagaggaggtgatggctacagtgactcccacttcggtgtggacgtctggggccaagggaccacggtcaccgtctcctca

SEQ ID NO: 760 - DNA, 369 bp, Homo sapiens
gaggtgcagctggtggagtctgggggaggcttggtccagccgggggggtccctgagactctcctgtgcagcctctggattcacctttagtagccattggatgacttggttccgtcaggctccagggaaggggctggagtgggtggcccacataaaggaagacgaaagtgagaaatactatgtggactctgtgaagggccgattcaccatctccagagacaacgccaagaactcgttatatctgcaaatgaacagtctgagagccgaagacacggctgtgtattactgtgcgagaggaggtgatggctacagtatctcccacttcggtgtggacgtctggggccaagggaccacggtcaccgtctcctca

SEQ ID NO: 761 - DNA, 369 bp, Homo sapiens
gaggtgcagctggtggagtctgggggaggcttggtccagccgggggggtccctgagactctcctgtgcagcctctggattcacctttagtagccattggatgacttggttccgtcaggctccagggaaggggctggagtgggtggcccacataaaggaaggcggaagtgagaaatactatgtggactctgtgaagggccgattcaccatctccagagacaacgccaagaactcgttatatctgcaaatgaacagtctgagagccgaagacacggctgtgtattactgtgcgagaggaggtgatggctacagtgactcccacttcggtgtggacgtctggggccaagggaccacggtcaccgtctcctca

SEQ ID NO: 762 - DNA, 369 bp, Homo sapiens
gaggtgcagctggtggagtctgggggaggcttggtccagccgggggggtccctgagactctcctgtgcagcctctggattcacctttagtagccattggatgacttggttccgtcaggctccagggaaggggctggagtgggtggcccacataaaggaagagggaagtgagaaatactatgtggactctgtgaagggccgattcaccatctccagagacaacgccaagaactcgttatatctgcaaatgaacagtctgagagccgaagacacggctgtgtattactgtgcgagaggaggtgatggctacagtgactcccacttcggtgtggacgtctggggccaagggaccacggtcaccgtctcctca

SEQ ID NO: 763 - DNA, 369 bp, Homo sapiens
gaggtgcagctggtggagtctgggggaggcttggtccagccgggggggtccctgagactctcctgtgcagcctctggattcacctttagtagccattggatgacttggttccgtcaggctccagggaaggggctggagtgggtggcccacataaaggaagacggaagtgagaaatactatgtggactctgtgaagggccgattcaccatctccagagacaacgccaagaactcgttatatctgcaaatgaacagtctgagagccgaagacacggctgtgtattactgtgcgagaggaggtgagggctacagtgactcccacttcggtgtggacgtctggggccaagggaccacggtcaccgtctcctca

SEQ ID NO: 764 - DNA, 369 bp, Homo sapiens
gaggtgcagctggtggagtctgggggaggcttggtccagccgggggggtccctgagactctcctgtgcagcctctggattcacctttagtagccattggatgacttggttccgtcaggctccagggaaggggctggagtgggtggcccacataaaggaagacggaagtgagaaatactatgtggactctgtgaagggccgattcaccatctccagagacaacgccaagaactcgttatatctgcaaatgaacagtctgagagccgaagacacggctgtgtattactgtgcgagaggaggtgttggctacagtgactcccacttcggtgtggacgtctggggccaagggaccacggtcaccgtctcctca

SEQ ID NO: 765 - DNA, 369 bp, Homo sapiens
gaggtgcagctggtggagtctgggggaggcttggtccagccgggggggtccctgagactctcctgtgcagcctctggattcacctttagtagccattggatgacttggttccgtcaggctccagggaaggggctggagtgggtggcccacataaaggaagacgaaagtgagaaatactatgtggactctgtgaagggccgattcaccatctccagagacaacgccaagaactcgttatatctgcaaatgaacagtctgagagccgaagacacggctgtgtattactgtgcgagaggaggtgttggctacagtatctcccacttcggtgtggacgtctggggccaagggaccacggtcaccgtctcctca

SEQ ID NO: 766 - DNA, 293 bp, Homo sapiens
gattcacctttagtagccattggatgacttggttccgtcaggctccagggaaggggctggagtgggtggcccacataaaggaagacgaaagtgagaaatactatgtggactctgtgaagggccgattcaccatctccagagacaacgccaagaactcgttatatctgcaaatgaacagtctgagagccgaagacacggctgtgtattactgtgcgagaggaggtgagggctacagtatctcccacttcggtgtggacgtctggggccaagggaccacggtcaccgtctcctca

SEQ ID NO: 767 - DNA, 369 bp, Homo sapiens
gaggtgcaattagtcgaatcggggggtggactggttcagccgggaggtagcctgcgcctgtcctgtgccgcatctggttttacattaagtaactactggatgaattgggttcgtcaagcgcctggaaagggcttagagtgggtggctaatattaaccaggacgggtcagagcgctactatgtggattcagtaaaaggtcgcttcactatcagccgcgataatgctaaaaattcgctgtaccttcagatgtcatcacttcgtgcagaggatacagctgtgtatttctgcgcgcgtggaggcgaggggtacggggtagaccactatgggttggatgtctcgggacaaggcacgaccgtcactgtcagtagc

SEQ ID NO: 768 - DNA, 369 bp, Homo sapiens
gaggtccagttggttgagtccggcggcggcttggtccaaccaggggggtcgcttcgcttatcttgcgctgccacagggtttaccctgagcaactactggatgaactgggtgcgccaagcgcctgggaaggggttagagtgggtcgccaacatcaaccaagacggttcggagcgttactatgtcgacagcgtgaagggccgtttcacgatctcccgcgataacgctaagaactccctgtatttgcaaatgaatagccttcgtgcggaggatactgcggtttatttctgtgctcgtggcggtgaaggatatggggttgaccattatgggttggatgtctccgggcaagggacaacggtgaccgtgtcatcc

SEQ ID NO: 769 - DNA, 369 bp, Homo sapiens
gaggttcaacttgttgaatcgggtggcggattagtacaacccggcggctcgctgcgtttatcgtgtgcggcaaccggatttactttatcaaactattggatgaattgggtgcgccaggctccagggaaaggtctggaatgggtagcgaatatcaaccaagacggctcagaacgctactacgtggactccgtaaaaggtcgtttcaccatctctcgtgacaatgctaaaaattctttgtatttgcaaatgagttcacttcgtgctgaggatactgcggtctattactgtgctcgcgggggggaaggctacggagtagaccactacgggttggatgtttctggacagggaacgacggttactgtaagcagc

SEQ ID NO: 770 - DNA, 369 bp, Homo sapiens
gaggttcagttagttgagtccggcgggggattagttcaacctggcggaagccttcgtctgagttgtgccgcgagcgggtttacccttagcaattactggatgaactgggtacgtcaagctccaggtaaaggtttagaatgggtcgctaacattaatcaagatggttctgaacgctattatgtagactcggtaaagggtcgttttacaatttctcgcgacaacgccaaaaactctttgtaccttcaaatgaattccttacgcgctgaggacactgctgtctatttctgtgcgcgtggaggggagggatacggagttgaccactatgggctggacgtttcaggacagggcactacggtaactgtgtcttcg

SEQ ID NO: 771 - DNA, 369 bp, Homo sapiens
gaggttcagttagtagagtccgggggaggactggtacaacctgggggtagtttgcgtctgtcttgtgcagccagcggtttcacattgtctaactattggatgaattgggttcgtcaagcgcctggcaagggactggagtgggttgcaaacattaatcaagatggcagcgagcgttattacgtggactcagtaaaagggcgcttcacgattagccgcgataatgctaagaactccttatatctgcagatgtcatctttgcgtgccgaggacacggcagtttactattgcgcacgtggtggcgagggatacggcgtggatcactatggtttggacgtatcgggccaagggactaccgtgactgtgtcctct

SEQ ID NO: 772 - DNA, 372 bp, Homo sapiens
gaggaggtacagcttgtcgagtctggcggtggccttgtgcaaccggggggttctttacgtttatcctgtgccgctacaggatttacgttaagcaactattggatgaactgggtacgtcaagctccggggaaggggctggaatgggttgccaatatcaatcaggatgggtctgaacgctactacgttgattctgttaagggtcgctttactatttcacgtgacaatgccaagaacagtctttaccttcaaatgaactcgttacgcgctgaggatactgctgtgtactactgtgcgcgcggcggagagggatacggtgtcgatcattatgggcttgacgtaagcgggcagggtacgacggtgacggtatcatca

SEQ ID NO: 773 - DNA, 369 bp, Homo sapiens
gaggtgcagttagttgagagcggaggtggtttagttcagccggggggctcgcttcgcctgtcgtgcgccgcctcgggattcacattatcaaactactggatgaattgggtccgccaggctccgggcaaaggtcttgagtgggtggcgaacattaatcaggacgggagcgagcgttattacgttgattcggtaaaaggacgtttcactatcagtcgtgacaacgctaaaaattccttgtacttacagatgaactcacttcgtgctgaggacaccgcagtgtactactgtgctcgcggtggtgaaggatacggcgtcgatcactacggccttgatgtatcaggacaggggactacagttaccgtctcttcc

SEQ ID NO: 774 - DNA, 369 bp, Homo sapiens
gaggtgcagttggtagagagtgggggtggcctggtccaaccaggtgggtcccttcgtttgtcttgcgccgcctctgggtttactctgtcaaattattggatgaactgggtgcgccaagctcccggcaaggggttggagtgggttgccaacattaatcaggacgaatccgagcgttactatgttgattctgtaaaagggcgcttcactatctctcgtgataatgctaagaacagtttgtacctgcaaatgaattcactgcgtgccgaggataccgcggtgtactattgtgcccgtggaggagagggatacggggtcgatcactatggcttagacgtatcgggccagggaacaaccgtcaccgtatcctca

SEQ ID NO: 775 - DNA, 366 bp, Homo sapiens
gaggtgcagctggtggagtctgggggaggcttggtcaagcctggagggtccctgagagtctcctgtgcagcctctggattcaccttcagtgactactacatgagctggttccgccaggctccagggaaggggctggagtgggtttcatacattagtggtagtggtgatatcatagactacgcagactctgtaaagggccgattcaccatctccagggacaacgccaagaactctctgtatctgcagatgaacaacctgagagccgaggacacggccgtgtatcactgtgcgagagaagattcccgtctaactggaactacggactttgacaattggggccagggaaccctggtcaccgtctcctca

SEQ ID NO: 776 - DNA, 366 bp, Homo sapiens
gaggtgcagctggtggagtctgggggaggcttggtcaagcctggagggtccctgagagtctcctgtgcagcctctggattcaccttcagtgactactacatgagctggttccgccaggctccagggaaggggctggagtgggtttcgtacattagtggtagtggtgatatcatagactatgcagactctgtgaagggccgattcaccatctccagggacaacgccaagaactcactgtatctgcaaatgaacagcctgagagccgaggacacggccgtgtatcactgtgcgaaagaagattcccgtatacctggaactacggactttgacaattggggccagggaaccctggtcactgtctcctca

SEQ ID NO: 777 - DNA, 366 bp, Homo sapiens
gaggtgcagctggtggagtctgggggaggcttggtcaagcctggagggtccctgagagtctcctgtgcagcctctggattcaccttcagtgactactatatgagttggttccgccaggctccagggaaggggctggagtggatttcgtacattagtggtagtggtgatatcatagactacgcagactctgtgaagggccgattcaccatctccagggacaacgccaagaactcactgtatctgcaaatgaacagcctgagagccgaggacacggccgtgtatcactgtgcgaaagaagattcccgtatacctggaactacggactttgacaattggggccagggaaccctggtcaccgtctcttca

SEQ ID NO: 778 - DNA, 366 bp, Homo sapiens
gaggtgcagctggtggagtctgggggaggcttggtcaagcctggagggtccctgagagtctcctgtgcagcctctggattcaccttcagtgactactacatgagctggttccgccaggctccagggaaggggctggagtgggtttcgtacattagtggtagtggtgatgtcattgactatgcagactctgtgaagggccgattcaccatctccagggacaacgccaagaattcactgtatctgcaaatgaacagcctgagagccgaggacacggccgtgtatcactgtgcgaaagaagattcccgtatacctggaactacggactttgacaattggggccagggaaccctggtcactgtctcttca

SEQ ID NO: 779 - DNA, 366 bp, Homo sapiens
gaggtgcagctggtggagtctgggggaggcttggtcaagcctggagggtccctgagactctcctgtgcagtctctggattcaccttcagtgactactacatgagctggttccgccaggctccagggaaggggctggagtgggtttcgtacattagtggtagtggtgatatcatagactatgcagactctgtgaagggccgattcaccatctccagggacaacgccaagaactcactgtatctgcaaatgaacagcctgagagccgaggacacggccgtgtatcactgtgcgaaagaagattcccgtatacctggaactacggactttgacaattggggccagggaaccctggtcactgtctcctca

SEQ ID NO: 780 - DNA, 366 bp, Homo sapiens
gaggtgcagctggtggagtctgggggaggcttggtcaagcctggagggtccctgagagtctcctgtgcagcctctggattcaccttcagtgactactacatgagctggttccgccaggctccagggaaggggctggagtgggtttcgtacattagtggtagtggtgatatcatagactatgcggactctgtgaagggccgattcaccatctccagggacaacgccaagaactcactgtatctgcaaatgaacagcctgagagccgaggacacggccgtgtatcactgtgcgaaagaagattcccgtatacctggaactacggactttgacagttggggccaagggacaatggtcaccgtctcctca

SEQ ID NO: 781 - DNA, 366 bp, Homo sapiens
gaggtgcagctggtggagtctgggggaggcttggtcaagccaggagggtccctgagactctcctgtgcagcctctggattcaccttcagtgactactacatgagctggttccgccaggctccagggaaggggctggagtgggtttcatacattagtggtagtggtactaccatagactacgcagactctgtgaagggccgcttcaccatctccagggacaacgccaggaactcactatatctgcaaatgaacagcctgagagccgaggacacggccgtgtattactgtgccagagaagatatcaggatgactggaactacggactttgacaactggggccagggaaccctggtcaccgtctcttca

SEQ ID NO: 782 - DNA, 366 bp, Homo sapiens
gaggtgcagctggtggagtctgggggaggcttggtcaagcctggagggtccctgagactctcctgtgcagcctctggattcgccttcagtgactactacatgagctggttccgccaggctccagggaaggggctggagtgggtttcacacattagtggtagtggaactaccatagactacgcagactctgtgaagggccgattcaccatctccagagacaacgccaagaactcactatatctacaaatgaacagcctgagagccgaggacacggccgtgtatcactgtgcgagagaagattcccgcatgcctggaactacggactttgacaactggggccagggaaccctggtcaccgtctcctca

SEQ ID NO: 783 - DNA, 366 bp, Homo sapiens
gaggtgcagctggtggagtctgggggaggcttggtcaagcctggagggtccctgagactctcctgtgcagcctctggattcaccttcagtgactactatatgacctggttccgccaggctccagggaagggactggagtggatttcatacattagtggtagtggtgataccatagactacgcagagtctgtgaagggccgattcaccatctccagggacaacgccaagaattcactgtatctgcagatgaacagcctgagagccgaggacacggccgtgtatcactgtgcgagagaagattcgcgtatagccggaactacggactttgacaactggggcccgggaaccctggtcactgtctcttca

SEQ ID NO: 784 - DNA, 366 bp, Homo sapiens
gaggtgcagctggtggagtctgggggaggcttggtcaagcctggagggtccctgagactctcctgtgcagcctctggattcaccttcagtgactactacatgacctggttccgccaggctccagggaaggggctggagtgggtttcatacattagtagtagtggtagtaacatagattacgcagactctgtgaagggccgattcaccatctctagggacaacgccaagaactcactgtatctgcaaatgaacagcctgagagccgaggacacggccgtgtattactgtgcgagagaagattcccgtttaagtggaactacggactttgactactggggccagggaaccctggtcaccgtctcttca

SEQ ID NO: 785 - DNA, 366 bp, Homo sapiens
gaggtgcagctggtggagtctgggggaggcttggtccagcctggggggtccctgagactctcctgtgcagcctctggattcaccttcagtgactactatatgacctggttccgccaggctccagggaagggactggagtggatttcatacattagtggtagtggtgataccatagactacgcagagtctgtgaagggccgattcaccatctccagggacaacgccaagaattcactgtatctgcagatgaacagcctgagagccgaggacacggccgtgtatcactgtgcgagagaagattcgcgtatagccggaactacggactttgacaactggggcccgggaaccctggtcactgtctcctca

SEQ ID NO: 786 - DNA, 366 bp, Homo sapiens
gaggtgcagctggtggagtctgggggaggcttggtcaagcctggagggtccctgagactctcctgtgcagcctctggattcaccttcagtgactactacatgagctggttccgccaggctccagggaaggggctggagtgggtttcacacattagtggtagtggtactaccatagactacgcagactctgtgaagggccgcttcaccatctccagggacaacgccaggaagtcactatatctgcagatgaacagcctgagagccgaggacacggccgtctattactgtgccagagaagatatcaggatgactggaactacggactttgaccactggggccaaggaaccctggtcaccgtctcctca

SEQ ID NO: 787 - DNA, 366 bp, Homo sapiens
caggtgcagctggtggagtctgggggaggcttggtcaagcctggagggtccctgagactctcctgtgcagcctctggattcaccttcagtgactactacatgagctggttccgccaggctccagggaaggggctggagtgggtttcacacattagtagtagtggtaataccatagactacgcagactctgtgaagggccgcttcaccatctccagggacaacgccaagaactcactttatctgcaaatgaatagtctgagagccgaggacacggccgtttattactgtgcgagagaagatcctcgtttacctggaactacagattttgactactggggccagggaaccctggtcactgtctcctca

SEQ ID NO: 788 - DNA, 366 bp, Homo sapiens
gaggtgcagttggtggagtctgggggaggcttggtcaagcctggagggtccctgagactctcctgtgcagcctctggattcaccttcagtgactactatatgacctggttccgccaggctccagggaagggactggagtggatttcatacattagtggtagtggtgataccatagactacgcagagtctgtgaagggccgattcaccatctccagggacaacgccaagaattcactgtatctgcagatgaacagcctgagagccgaggacacggccgtgtattactgtgccagagaagatatcaggatgcctggaactacggactttgaccactggggccaaggaaccctggtcaccgtctcctca

SEQ ID NO: 789 - DNA, 366 bp, Homo sapiens
gaggtgcagctggtggagtctgggggaggcttggtcaagcctggagggtccctgagactctcctgtgcagtctctggattcaccttcagtgactactacatgagctggttccgccaggctccagggaaggggctggagtgggtttcacacattagtggtagtggaactaccatagactacgcagactctgtgaagggccgcttcaccatctccagggacaacgccaggaattcactgtatctgcaaatgaacagcctgagagccgaggacacggccgtgtattactgtgccagagaagatatcaggatgcctggaactacggattttgaccactggggccaaggaaccctggtcactgtctcttca

SEQ ID NO: 790 - DNA, 366 bp, Homo sapiens
caggtgcagctggtggagtctgggggaggcttggtcaagcctggagggtccctgagactctcctgtgcagcctctggattcaccttcagtgactactacatgagctggatccgccaggctccagggaaggggctggagtgggtttcacacattagtagtagtgggagtaccatagactacgcagactctgtgaagggccgattcaccatctccagggacaacgccaagaactcactgtatctgcaaatgaacagcctgagagccgaggacacggccgtgtattactgtgcgagagaagatcctcgtttaactggaactacagattttgactactggggccagggagccctggtcactgtctcctca

SEQ ID NO: 791 - DNA, 366 bp, Homo sapiens
caggtgcagctggtggagtctgggggaggcttggtcaagcctggagggtccctgagactctcctgtgcagcctctggattcaccttcagtgactactacatgagctggatccgccaggctccagggaaggggctggagtgggtttcatacattagtagtagtggtagtaccatatcctacgcagactctgtgaagggccgattcaccatctccagggacaacgccaagaactcactgtatctgcaaatgaacagcctgagagccgaggacacggccgtgtattactgtgcgagagaagatcctcgtataagtggaactacagattttgacaattggggccagggaaccctggtcaccgtctcctca

SEQ ID NO: 792 - DNA, 366 bp, Homo sapiens
caggtgcagctgcaggagtcggggggaggcttggtcaagcctggagggtccctgagactctcctgtgcagcctctggattcaccttcagtgactactacatgagctggttccgccaggctccagggaaggggctggagtgggtttcacacattagtagtagtggtaataccatagactacgcagactctgtgaagggccgcttcaccatctccagggacaacgccaagaactcactgtatctgcaaatgaacagcctgagagccgaggacacggccgtttattactgtgcgagagaagatcctcgtttacctggaactacagattttgactactggggccagggaaccctggtcaccgtctcctca

SEQ ID NO: 793 - DNA, 366 bp, Homo sapiens
caggtgcagctggtggagtctgggggaggcttggtcaagcctggagggtccctgagactctcctgtgcagcctctggattcaccttcagtgactactacatgagctggttccgccaggctccagggaaggggctggagtgggtttcatacattagtggtactggtattaccacagactacgcagactctgtgaagggccgcttcaccatctccagggacaacgccaagaactcactgtatctgcaaatgaacagcctgagagccgaggacacggccgtgtattactgtgcgagagaagatcctcgtttacctggaacttcagaatttgacaactggggccagggaaccctggtcaccgtctcctca

SEQ ID NO: 794 - DNA, 366 bp, Homo sapiens
gaggtgcagctggtggagtctgggggaggcttggtcaagcctggagggtccctgagactctcctgtgcagcctctggattcaccttcagtgactactacatgagctggatccgccaggctccagggaaggggctggagtgggtttcacacattagtagtagtggtagtaccatagattatgcagactctgtgaagggccgattcaccatctccagggacaacgccaagaactcactgtatctgcaaatgaacagcctgagagccgaggacacggccgtctattactgtgcgagagaagatccccgtatgcctggaacttttgactttgacaactggggccagggaaccctggtcaccgtctcctca

SEQ ID NO: 795 - DNA, 366 bp, Homo sapiens
gaggtgcagctggtggagtctgggggaggcttggtcaagcctggagggtccctgagactctcctgtgcagcctctggattcgccttcagtgactactacatgagctggttccgccaggctccagggaaggggctggagtgggtttcacacattagtggtagtggaactaccatagactacgcagactctgtgaagggccgcttcaccatctccagggacaacgccaggaattcactgtatctgcaaatgaacagcctgagagccgaggacacggccgtgtattactgtgccagagaagatatcaggatgcctggaactacggactttgaccactggggccaaggaaccctggtcactgtctcttca

SEQ ID NO: 796 - DNA, 366 bp, Homo sapiens
gaggtgcagctggtggagtctgggggaggcttggtcaagcctggagggtccctgagactctcctgtgcagtctctggattcaccttcagtgactactacatgagctggttccgccaggctccagggaaggggctggagtgggtttcacacattagtggtagtggaactaccatagactacgcagactctgtgaagggccgcttcaccatctccagggacaacgccagggattcactgtatctgcaaatgaacagcctgagagccgaggacacggccgtgtattactgtgccagagaagatatcaggatgcctggaactacggattttgaccactggggccaaggaaccctggtcactgtctcttca

SEQ ID NO: 797 - DNA, 366 bp, Homo sapiens
gaggtgcagctggtggagtctgggggaggcttggtcacgcctggagggtccctgagactctcctgtgcagtctctggattcaccttcagtgactactacatgagctggttccgccaggctccagggaaggggctggagtgggtttcacacattagtggtagtggaactaccatagactacgcagactctgtgaagggccgcttcaccatctccagggacaacgccaggaattcactgtatctgcaaatgaacagcctgagagccgaggacacggccgtgtattactgtgccagagaagatatcaggatgcctggaactacggattttgaccactggggccaaggaaccctggtcaccgtctcctca

SEQ ID NO: 798 - DNA, 366 bp, Homo sapiens
gaggtgcagctggtggagtctgggggaggcttggtcaagcctggagggtccctgagactctcctgtgcagtctctggattcaccttcagtgactactacatgagctggttccgccaggctccagggaaggggctggagtgggtttcacacattagtggtagtggaactaccatagactacgcagactctgtgaagggccgcttcaccatctccagggacaacgccaggaattcactgtatctgcaaatgaacagcctgagagccgaggacacggccatgtattactgtgccagagaagatatcaggatgcctggaactacggattttgaccactggggccaaggaaccctggtcaccgtctcctca

SEQ ID NO: 799 - DNA, 366 bp, Homo sapiens
gaggtgcagctggtggagtctgggggaggcttggttaagcctggagggtccctgagactctcctgtgcagcctctggattcgccttcagtgactactacatgagctggttccgccaggctccagggaaggggctggagtgggtttcacacattagtggtagtggaactaccatagactacgcagactctgtgaaggaccgcttcaccatctccagggacaacgccaggaattcactgtatctgcaaatgaacagcctgagagccgaggacacggccgtgtattactgtgccagagaagatatcaggatgcctggaactacggactttgaccactggggccaaggaaccctggtcactgtctcttca

SEQ ID NO: 800 - DNA, 366 bp, Homo sapiens
gaggtgcagctggtggagtctgggggaggcttggtcaagcctggagggtccctgagactctcctgtacagcctctggattcaccttcactgactattatatgagctggttccgccaggctccagggaagggactggagtgggtttcacacattagtagtagtggtactacaatagactacgcagactctgtgaagggccgattcaccatctccagggacaacgccaagaactcactgtatctgcaaatgaacagcctgagagccgacgacacggccgtatattactgtgcgagagaagatatcaggatgcctggaactacggactttgacaactggggccagggaaccctggtcactgtctcctca

SEQ ID NO: 801 - DNA, 366 bp, Homo sapiens
caggtgcagctggtggagtcggggggaggcttggtcaagcctggagggtccctgagactctcctgtgcagcctctggattcaccttcagtgactactacatgacctggttccgccaggctccagggaaggggctggagtgggtttcatacattagtagtagtggtagtaccatttcctacgcagactctgtgaagggccgattcaccatctccagggacaacgccaacaactcactgtatctgcaaatgaacagcctgagagccgaggacacggccgtatatcactgtgcgagagaagatatacgtatgagtgggactacggactttgactactggggccagggaaccctggtcactgtctcctca

SEQ ID NO: 802 - DNA, 366 bp, Homo sapiens
caggtgcagctggtggagtctgggggaggcttggtcaagcctggagggtccctgagactctcctgtgcagcctctggattcatcttcagtgactactacatgagctggttccgccaggctccagggaaggggctggagtgggtttcacacattagtagtagtggtagttccatagactacgcagactctgtgaagggccgattcaccatttcgagggacaacgccaagaactcactgtatctgcaaatgaacagcctgagagccgaggacacggccgtgtattactgtgcgagagaagatcctcgtttaagtggaactatagattttgactcctggggccagggaaccctggtcaccgtctcttca

SEQ ID NO: 803 - DNA, 366 bp, Homo sapiens
gaggtgcagctggtggagtctgggggaggcttggtcaagcctggagggtccctgagactctcctgtgcagcctctggattcgccttcagtgactactacatgagctggttccgccaggctccagggaaggggctggagtgggtttcacacattggtggtagtggaactaccatagactacgcagactctgtgaagggccgcttcaccatctccagggacaacgccaggaattcactgtatctgcaaatgaacagcctgagagccgaggacacggccgtgtattactgtgccagagaagatatcaggatgcctggaactacggactttgaccactggggccaaggaaccctggtcaccgtctcctca

SEQ ID NO: 804 - DNA, 366 bp, Homo sapiens
caggtgcagctggtggagtctgggggaggcttggtcaagcctggagggtccctgagactctcctgtgcagcctctggattcaccttcagtgactactacatgagctggatccgccaggctccagggaaggggctggagtgggtttcatacattagtagtagtggtagtaccatatactacgcagactctgtgaagggccgattcaccatctccagagacaacgccaagaactcactgtatctgcaaatgaacagcctgagagccgaggacacggccgtgtattactgtgcgagagaagatcctcgtgtgcctggaactacgaactttgactactggggccagggaaccctggtcactgtctcctca

SEQ ID NO: 805 - DNA, 366 bp, Homo sapiens
caggtgcagctggtggagtctgggggaggcttggtcaagcctggagggtccctgagactctcctgtgcagcctctggattcaccttcagtgactactacatgacctggatgcgccaggctccagggaaggggctggagtgggtttcatacattagtggcagtggtagtaccattgactatgcagactctgtgaagggccgattcacgatctccagggacaacgccaagaactcactgtacctgcaaatgaacagcctgagacccgaggacacggccgtgtattactgtgcgaaagaagatggccgtatacctggaactacggactttgaccactggggccagggaaccctggtcactgtctcttca

SEQ ID NO: 806 - DNA, 366 bp, Homo sapiens
gaggtgcagctggtggagtctgggggaggcttggtccagcctggggggtccctgagactctcctgtgcagcctctggattcgccttcagtgactactacatgagctggttccgccaggctccggggaaggggctggagtgggtttcacacattagtggtagtggaactaccatagactacgcagactctgtgaaggaccgcttcaccatctccagggacaacgccaggaattcactgtatctgcaaatgaacagcctgagagccgaggacacggccgtgtattactgtgccagagaagatatcaggatgcctggaactacggactttgaccactggggccaaggaaccctggtcaccgtctcctca

SEQ ID NO: 807 - DNA, 366 bp, Homo sapiens
caggtgcagctggtggagtctgggggaggcttggtcaagcctggagggtccctgagactctcctgtgcagcctctggattccccttcagtgactacttcatgagctggttccgccaggctccagggaaggggctggagtgggtttcacacattagtagtagtggtaattccatagactacgcagactctgtgaagggccgcttcaccatctccagggacaacgccaagaactcactgtatctgcaaatgaacagcctgagagccgaggacacggccgtttattactgtgcgaaagaagatcctcgtttacctggaactacagattttgactactggggccagggaaccctggtcactgtctcttca

SEQ ID NO: 808 - DNA, 366 bp, Homo sapiens
caggtgcagctggtggagtctgggggaggcttggtcaagcctggagggtccctgagactctcctgtgcagcctctggattcaccttcagtgactcctacatgagctggatccgccaggctccagggaaggggctggagtgggtttcacatattagtaattctggtagtaccataagctacgcagactctgtgaagggccgattcaccatctccagggacaacgccaagaactcactgtatctgcaaatgaacagcctgagagccgaggacacggccgtgtattactgtgcgagagaagatcctcgtttacctggaacttcagattttgactactggggccagggaaccctggtcactgtctcttca

SEQ ID NO: 809 - DNA, 366 bp, Homo sapiens
caggtgcagctggtggagtctgggggaggcgtggtccagcctgggaggtccctgagactctcctgtgcagcctctggattcaccttcagtgactactacatgagctggatccgccaggctccagggaaggggctggagtgggtttcacacattagtagtagtggtagttccatagactacgcagactctgtgaagggccgattcaccatttcgagggacaacgccaagaattcactgtatctgcaaatgaacagcctgagagacgaggacacggccgtgtattactgtgcgagagaagatcctcgtttaagtggaactacagattttgaccagtggggccagggaaccctggtcaccgtctcctca

SEQ ID NO: 810 - DNA, 366 bp, Homo sapiens
caggtgcagctggtggagtctgggggaggcttggtccagcctggggggtccctgagactctcctgtgcagcctctggattcacctttagtagctattggatgagctgggtccgccaggctccagggaaggggctggagtgggtttcacacattagtagtagtggtagtaccatagactacgcagagtctgtgaagggccgattcaccatctccagggacaacgccaagaactcactgtatctgcaaatgaacagcctgagagccgaggacacggccgtgtattactgtgcgagagaagatcctcgtatgactggaactacagattttgactactggggccagggaaccctggtcaccgtctcttca

SEQ ID NO: 811 - DNA, 366 bp, Homo sapiens
caggtgcagctgcaggagtcggggggaggcttggtcaagcctggagggtccctgagactctcctgtgcagcctctggattcaccttcagtaactacttcatgagttggatccgccaggctccagggaaggggctggagtgggtttcacacattagtagtagtggtaataccatagactacgcagactctgtgaagggccgcttcaccatctccagggacaacgccaagaactcactttatctgcaaatggatagtctgagagccgaggacacggccgtttattactgttcgagagaagatcctcgtttacctggaactacagattttgactactggggccagggaaccctggtcactgtctcttca

SEQ ID NO: 812 - DNA, 366 bp, Homo sapiens
gaggtgcagctggtggagtctgggggaggcgtggtcaagcctggagggtccctgagactctcctgtgcagcctctggattcactttcagtgactactacatgacctggatccgccagggtccagggaagggacaggaatggatttcatacattagtagtggtggtagcaccatacactacgcagactctgtgaagggccgattcaccatctccagggacaacgccaagaactcactgtatctgcaaatgaacagcctgagagccgaggacacggccgtgtattactgtgcgagagaaaatccccgtttacctggaactatggactttgactattggggccagggaaccctggtcactgtctcctca

SEQ ID NO: 813 - DNA, 366 bp, Homo sapiens
caggtgcagctggtggagtctgggggaggcttggtccagcctggggggtccctgagactctcctgtgcagcctctggattcaccttcagtgaccacttcatgagctggttccgccaggctccagggaaggggctggagtgggtggccaacataaaacaagatggaagtgagaaatactatgtggactctgtgaagggccgattcaccatctccagagacaacgccaagaactcactgtttctgcaaatgaacagcctgagagccgaggacacggctatgtattactgtgcgagagaggatcctcgtttaactggaactacagattttgacaactggggccagggaaccctggtcactgtctcttca

SEQ ID NO: 814 - DNA, 366 bp, Homo sapiens
gaggtgcagctggtggagtctgggggaggcttggtccaggcgggggggtccctaagactctcctgtgtagcctctggattcacctttagtaattattggatgacctggttccgccaggctccagggagggggctggagtgggtttcacacattagtagtactggatctaccatagactacgcagactctgtgaagggccgattcaccatctccagggacaacgccgagaactcactatatttgcaaatgaacagcctgagagccgaggacacggccgtgtattactgtgcgagagaagatccccgtttacctggaactatggactttgactattggggccagggaaccctggtcaccgtctcctca

SEQ ID NO: 815 - DNA, 366 bp, Homo sapiens
gaggtgcagctggtggagtctgggggaggcttggtcaagcctggagggtccctgagactctcctgtgcagcctctggattcaccttcagtgactactacatgagctggttccgccaggctccagggaaggggctggagtgggtttcatacattagtggtagtggtgatatcatagactacgcagactctgtaaagggccgattcaccatctccagggacaacgccaagaactctctgtatctgcagatgaacaacctgagagccgaggacacggccgtgtatcactgtgcgagagaagattcccgtctaactggaactacggactttgacaattggggccagggaaccctggtcaccgtctcctca

SEQ ID NO: 816 - DNA, 366 bp, Homo sapiens
gaggtgcagctggtggagtctgggggaggcttggtcaagcctggagggtccctgagagtctcctgtgcagcctctggattcaccttcagtgactactacatgagctggatccgccaggctccagggaaggggctggagtgggtttcatacattagtggtagtggtgatatcatagactacgcagactctgtaaagggccgattcaccatctccagggacaacgccaagaactctctgtatctgcagatgaacaacctgagagccgaggacacggccgtgtatcactgtgcgagagaagattcccgtctaactggaactacggactttgacaattggggccagggaaccctggtcaccgtctcctca

SEQ ID NO: 817 - DNA, 366 bp, Homo sapiens
gaggtgcagctggtggagtctgggggaggcttggtcaagcctggagggtccctgagagtctcctgtgcagcctctggattcaccttcagtgactactacatgagctggttccgccaggctccagggaaggggctggagtgggtttcatacattagtggtagtggtgatatcatagactacgcagactctgtaaagggccgattcaccatctccagggacaacgccaagaactctctgtatctgcagatgaacagcctgagagccgaggacacggccgtgtatcactgtgcgagagaagattcccgtctaactggaactacggactttgacaattggggccagggaaccctggtcaccgtctcctca

SEQ ID NO: 818 - DNA, 366 bp, Homo sapiens
gaggtgcagctggtggagtctgggggaggcttggtcaagcctggagggtccctgagagtctcctgtgcagcctctggattcaccttcagtgactactacatgagctggttccgccaggctccagggaaggggctggagtgggtttcatacattagtggtagtggtgatatcatagactacgcagactctgtaaagggccgattcaccatctccagggacaacgccaagaactctctgtatctgcagatgaacaacctgagagccgaggacacggccgtgtattactgtgcgagagaagattcccgtctaactggaactacggactttgacaattggggccagggaaccctggtcaccgtctcctca

SEQ ID NO: 819 - DNA, 366 bp, Homo sapiens
gaggtgcagctggtggagtctgggggaggcttggtcaagcctggagggtccctgagactctcctgtgcagcctctggattcaccttcagtgactactacatgagctggttccgccaggctccagggaaggggctggagtgggtttcatacattagtggtagtggtgatatcatagactacgcagactctgtaaagggccgattcaccatctccagggacaacgccaagaactctctgtatctgcagatgaacaacctgagagccgaggacacggccgtgtattactgtgcgagagaagattcccgtctaactggaactacggactttgacaattggggccagggaaccctggtcaccgtctcctca

SEQ ID NO: 820 - DNA, 366 bp, Homo sapiens
gaggtgcagctggtggagtctgggggaggcttggtcaagcctggagggtccctgagactctcctgtgcagcctctggattcaccttcagtgactactacatgagctggatccgccaggctccagggaaggggctggagtgggtttcatacattagtggtagtggtgatatcatagactacgcagactctgtaaagggccgattcaccatctccagggacaacgccaagaactctctgtatctgcagatgaacagcctgagagccgaggacacggccgtgtattactgtgcgagagaagattcccgtctaactggaactacggactttgacaattggggccagggaaccctggtcaccgtctcctca

SEQ ID NO: 821 - DNA, 366 bp, Homo sapiens
gaggtgcagctggtggagtctgggggaggcttggtcaagcctggagggtccctgagactctcctgtgcagcctctggattcaccttcagtgactactacatgagctggttccgccaggctccagggaaggggctggagtgggtttcatacattagtggtagtggtgatatcatagactacgcagactctgtaaagggccgattcaccatctccagggacaacgccaagaactctctgtatctgcagatgaacagcctgagagccgaggacacggccgtgtattactgtgcgagagaagattcccgtctaactggaactacggactttgacaattggggccagggaaccctggtcaccgtctcctca

SEQ ID NO: 822 - DNA, 366 bp, Homo sapiens
gaggtgcagctggtggagtctgggggaggcttggtcaagcctggagggtccctgagactctcctgtgcagcctctggattcaccttcagtgactactacatgagctggatccgccaggctccagggaaggggctggagtgggtttcatacattagtggtagtggtgatatcatagactacgcagactctgtaaagggccgattcaccatctccagggacaacgccaagaactctctgtatctgcagatgaacagcctgagagccgaggacacggccgtgtattactgtgcgagagaagatgcccgtctaactggaactacggactttgacaattggggccagggaaccctggtcaccgtctcctca

SEQ ID NO: 823 - DNA, 366 bp, Homo sapiens
gaggtgcagctggtggagtctgggggaggcttggtcaagcctggagggtccctgagactctcctgtgcagcctctggattcaccttcagtgactactacatgagctggatccgccaggctccagggaaggggctggagtgggtttcatacattagtggtagtggtgatatcatagactacgcagactctgtaaagggccgattcaccatctccagggacaacgccaagaactctctgtatctgcagatgaacagcctgagagccgaggacacggccgtgtattactgtgcgagagaagatccccgtctaactggaactacggactttgacaattggggccagggaaccctggtcaccgtctcctca

SEQ ID NO: 824 - DNA, 366 bp, Homo sapiens
gaggtgcagctggtggagtctgggggaggcttggtcaagcctggagggtccctgagactctcctgtgcagcctctggattcaccttcagtgactactacatgagctggttccgccaggctccagggaaggggctggagtgggtttcatacattagtggtagtggtgatatcatagactacgcagactctgtaaagggccgattcaccatctccagggacaacgccaagaactctctgtatctgcagatgaacagcctgagagccgaggacacggccgtgtattactgtgcgagagaagatgcccgtctaactggaactacggactttgacaattggggccagggaaccctggtcaccgtctcctca

SEQ ID NO: 825 - DNA, 366 bp, Homo sapiens
gaggtgcagctggtggagtctgggggaggcttggtcaagcctggagggtccctgagactctcctgtgcagcctctggattcaccttcagtgactactacatgagctggttccgccaggctccagggaaggggctggagtgggtttcatacattagtggtagtggtgatatcatagactacgcagactctgtaaagggccgattcaccatctccagggacaacgccaagaactctctgtatctgcagatgaacagcctgagagccgaggacacggccgtgtattactgtgcgagagaagatccccgtctaactggaactacggactttgacaattggggccagggaaccctggtcaccgtctcctca

SEQ ID NO: 826 - protein, 5 aa, Homo sapiens
NYGMH

SEQ ID NO: 827 - protein, 17 aa, Homo sapiens
VISNDGNTKTYADSVKG

SEQ ID NO: 828 - protein, 14 aa, Homo sapiens
DETTTVTASYYFDY

SEQ ID NO: 829 - protein, 123 aa, Homo sapiens
EVQLVESGGGLVQPGGSLRLSCAASGFTFSNYGMHWVRQAPGKRLEWVAVISNDGNTKTYADSVKGRFTISRDNSKNMLYLQMTSLRTEDTAVYYCAQDETTTVTASYYFDYWGQGTLVTVSS

SEQ ID NO: 830 - protein, 5 aa, Homo sapiens
NYGMH

SEQ ID NO: 831 - protein, 17 aa, Homo sapiens
VISNDGNTKTYADSVKG

SEQ ID NO: 832 - protein, 14 aa, Homo sapiens
DETTTVTASYYFDY

SEQ ID NO: 833 - protein, 123 aa, Homo sapiens
EVQLVESGGGLVQPGGSLRLSCAASGFTFSNYGMHWVRQAPGKGLEWVAVISNDGNTKTYADSVKGRFTISRDNSKNMLYLQMTSLRTEDTAVYYCAQDETTTVTASYYFDYWGQGTLVTVSS

SEQ ID NO: 834 - protein, 5 aa, Homo sapiens
NYGMH

SEQ ID NO: 835 - protein, 17 aa, Homo sapiens
VISNDGNTKTYADSVKG

SEQ ID NO: 836 - protein, 14 aa, Homo sapiens
DETTTVTASYYFDY

SEQ ID NO: 837 - protein, 123 aa, Homo sapiens
EVQLVESGGGLVQPGGSLRLSCAASGFTFSNYGMHWVRQAPGKRLEWVAVISNDGNTKTYADSVKGRFTISRDNSKNTLYLQMTSLRTEDTAVYYCAQDETTTVTASYYFDYWGQGTLVTVSS

SEQ ID NO: 838 - protein, 5 aa, Homo sapiens
NYGMH

SEQ ID NO: 839 - protein, 17 aa, Homo sapiens
VISNDGNTKTYADSVKG

SEQ ID NO: 840 - protein, 14 aa, Homo sapiens
DETTTVTASYYFDY

SEQ ID NO: 841 - protein, 123 aa, Homo sapiens
EVQLVESGGGLVQPGGSLRLSCAASGFTFSNYGMHWVRQAPGKRLEWVAVISNDGNTKTYADSVKGRFTISRDNSKNMLYLQMNSLRTEDTAVYYCAQDETTTVTASYYFDYWGQGTLVTVSS

SEQ ID NO: 842 - protein, 5 aa, Homo sapiens
NYGMH

SEQ ID NO: 843 - protein, 17 aa, Homo sapiens
VISNDGNTKTYADSVKG

SEQ ID NO: 844 - protein, 14 aa, Homo sapiens
DETTTVTASYYFDY

SEQ ID NO: 845 - protein, 123 aa, Homo sapiens
EVQLVESGGGLVQPGGSLRLSCAASGFTFSNYGMHWVRQAPGKGLEWVAVISNDGNTKTYADSVKGRFTISRDNSKNTLYLQMTSLRTEDTAVYYCAQDETTTVTASYYFDYWGQGTLVTVSS

SEQ ID NO: 846 - protein, 5 aa, Homo sapiens
NYGMH

SEQ ID NO: 847 - protein, 17 aa, Homo sapiens
VISNDGNTKTYADSVKG

SEQ ID NO: 848 - protein, 14 aa, Homo sapiens
DETTTVTASYYFDY

SEQ ID NO: 849 - protein, 123 aa, Homo sapiens
EVQLVESGGGLVQPGGSLRLSCAASGFTFSNYGMHWVRQAPGKRLEWVAVISNDGNTKTYADSVKGRFTISRDNSKNTLYLQMNSLRTEDTAVYYCAQDETTTVTASYYFDYWGQGTLVTVSS

SEQ ID NO: 850 - protein, 5 aa, Homo sapiens
NYGMH

SEQ ID NO: 851 - protein, 17 aa, Homo sapiens
VISNDGNTKTYADSVKG

SEQ ID NO: 852 - protein, 14 aa, Homo sapiens
DETTTVTASYYFDY

SEQ ID NO: 853 - protein, 123 aa, Homo sapiens
EVQLVESGGGLVQPGGSLRLSCAASGFTFSNYGMHWVRQAPGKGLEWVAVISNDGNTKTYADSVKGRFTISRDNSKNMLYLQMNSLRTEDTAVYYCAQDETTTVTASYYFDYWGQGTLVTVSS

SEQ ID NO: 854 - protein, 5 aa, Homo sapiens
NYGMH

SEQ ID NO: 855 - protein, 17 aa, Homo sapiens
VISNDGNTKTYADSVKG

SEQ ID NO: 856 - protein, 14 aa, Homo sapiens
DETTTVTASYYFDY

SEQ ID NO: 857 - protein, 123 aa, Homo sapiens
EVQLVESGGGLVQPGGSLRLSCAASGFTFSNYGMHWVRQAPGKGLEWVAVISNDGNTKTYADSVKGRFTISRDNSKNTLYLQMNSLRTEDTAVYYCAQDETTTVTASYYFDYWGQGTLVTVSS

SEQ ID NO: 858 - protein, 5 aa, Homo sapiens
NYGMH

SEQ ID NO: 859 - protein, 17 aa, Homo sapiens
VISNDGNTKTYADSVKG

SEQ ID NO: 860 - protein, 14 aa, Homo sapiens
DETTTVTASYYFDY

SEQ ID NO: 861 - protein, 123 aa, Homo sapiens
EVQLVESGGGVVQPGGSLRLSCAASGFTFSNYGMHWVRQAPGKGLEWVAVISNDGNTKTYADSVKGRFTISRDNSKNTLYLQMNSLRTEDTAVYYCAQDETTTVTASYYFDYWGQGTLVTVSS

SEQ ID NO: 862 - protein, 5 aa, Homo sapiens
NYGMH

SEQ ID NO: 863 - protein, 17 aa, Homo sapiens
VISNDGNTKTYADSVKG

SEQ ID NO: 864 - protein, 14 aa, Homo sapiens
DETTTVTASYYFDY

SEQ ID NO: 865 - protein, 123 aa, Homo sapiens
EVQLVESGGGLVQPGGSLRLSCAASGFTFSNYGMHWVRQAPGKGLEWVAVISNDGNTKTYADSVKGRFTISRDNSKNTLYLQMNSLRAEDTAVYYCAQDETTTVTASYYFDYWGQGTLVTVSS

SEQ ID NO: 866 - protein, 5 aa, Homo sapiens
NYGMH

SEQ ID NO: 867 - protein, 17 aa, Homo sapiens
VISNDGNTKTYADSVKG

SEQ ID NO: 868 - protein, 14 aa, Homo sapiens
DETTTVTASYYFDY

SEQ ID NO: 869 - protein, 123 aa, Homo sapiens
EVQLVESGGGLVQPGRSLRLSCAASGFTFSNYGMHWVRQAPGKGLEWVAVISNDGNTKTYADSVKGRFTISRDNSKNTLYLQMNSLRTEDTAVYYCAQDETTTVTASYYFDYWGQGTLVTVSS

SEQ ID NO: 870 - protein, 5 aa, Homo sapiens
NYGMH

SEQ ID NO: 871 - protein, 17 aa, Homo sapiens
VISNDGNTKTYADSVKG

SEQ ID NO: 872 - protein, 14 aa, Homo sapiens
DETTTVTASYYFDY

SEQ ID NO: 873 - protein, 123 aa, Homo sapiens
EVQLVESGGGVVQPGRSLRLSCAASGFTFSNYGMHWVRQAPGKGLEWVAVISNDGNTKTYADSVKGRFTISRDNSKNTLYLQMNSLRTEDTAVYYCAQDETTTVTASYYFDYWGQGTLVTVSS

SEQ ID NO: 874 - protein, 5 aa, Homo sapiens
NYGMH

SEQ ID NO: 875 - protein, 17 aa, Homo sapiens
VISNDGNTKTYADSVKG

SEQ ID NO: 876 - protein, 14 aa, Homo sapiens
DETTTVTASYYFDY

SEQ ID NO: 877 - protein, 123 aa, Homo sapiens
EVQLVESGGGLVQPGRSLRLSCAASGFTFSNYGMHWVRQAPGKGLEWVAVISNDGNTKTYADSVKGRFTISRDNSKNTLYLQMNSLRAEDTAVYYCAQDETTTVTASYYFDYWGQGTLVTVSS

SEQ ID NO: 878 - protein, 5 aa, Homo sapiens
NYGMH

SEQ ID NO: 879 - protein, 17 aa, Homo sapiens
VISNDGNTKTYADSVKG

SEQ ID NO: 880 - protein, 14 aa, Homo sapiens
DETTTVTASYYFDY

SEQ ID NO: 881 - protein, 123 aa, Homo sapiens
EVQLVESGGGVVQPGGSLRLSCAASGFTFSNYGMHWVRQAPGKGLEWVAVISNDGNTKTYADSVKGRFTISRDNSKNTLYLQMNSLRAEDTAVYYCAQDETTTVTASYYFDYWGQGTLVTVSS

SEQ ID NO: 882 - protein, 5 aa, Homo sapiens
NYGMH

SEQ ID NO: 883 - protein, 17 aa, Homo sapiens
VISNDGNTKTYADSVKG

SEQ ID NO: 884 - protein, 14 aa, Homo sapiens
DETTTVTASYYFDY

SEQ ID NO: 885 - protein, 123 aa, Homo sapiens
EVQLVESGGGVVQPGRSLRLSCAASGFTFSNYGMHWVRQAPGKGLEWVAVISNDGNTKTYADSVKGRFTISRDNSKNTLYLQMNSLRAEDTAVYYCAQDETTTVTASYYFDYWGQGTLVTVSS

SEQ ID NO: 886 - protein, 5 aa, Homo sapiens
DHAMH

SEQ ID NO: 887 - protein, 17 aa, Homo sapiens
GISWNSGSMGYADSVKD

SEQ ID NO: 888 - protein, 18 aa, Homo sapiens
EKGPGLTGSTADYYGLDV

SEQ ID NO: 889 - protein, 127 aa, Homo sapiens
EVQLLESGGGSVQPGRSLRLSCAASGFTFDDHAMHWVRQAPGKGLEWVSGISWNSGSMGYADSVKDRFTISRDNAKSSLYLQMNSLRAEDTALYYCVREKGPGLTGSTADYYGLDVWGQGTMVTVSS

SEQ ID NO: 890 - protein, 5 aa, Homo sapiens
DYAMH

SEQ ID NO: 891 - protein, 17 aa, Homo sapiens
GISWNGGSMGYAASVKG

SEQ ID NO: 892 - protein, 18 aa, Homo sapiens
DKGPGLIGSTADYYGLDV

SEQ ID NO: 893 - protein, 127 aa, Homo sapiens
EVQLVESGGGLVQPGRSLRLSCAASGFTFDDYAMHWVRQAPGKDLEWVSGISWNGGSMGYAASVKGRFTISRDNAKNSLYLQMNSLRAEDTALYYCVKDKGPGLIGSTADYYGLDVWGQGTTVTVSS

SEQ ID NO: 894 - protein, 5 aa, Homo sapiens
DYAMH

SEQ ID NO: 895 - protein, 17 aa, Homo sapiens
GISWNSGSMGYADSVKD

SEQ ID NO: 896 - protein, 18 aa, Homo sapiens
DKGPGLIGSTADYHGLDV

SEQ ID NO: 897 - protein, 127 aa, Homo sapiens
EVQLLESGGGLVQPGRSLRLSCAASGFTFDDYAMHWVRQAPGKGREWVSGISWNSGSMGYADSVKDRFTISRDNAKNSLYLQMNSLRAEDTALYYCVKDKGPGLIGSTADYHGLDVWGQGTTVTVSS

SEQ ID NO: 898 - protein, 5 aa, Homo sapiens
DYAMH

SEQ ID NO: 899 - protein, 17 aa, Homo sapiens
GISWNGGSMGYAESVKG

SEQ ID NO: 900 - protein, 18 aa, Homo sapiens
DKGPGLTGTTADYYGMDV

SEQ ID NO: 901 - protein, 127 aa, Homo sapiens
EVQLLESGGGLVQPGRSLRLSCAASGFTFADYAMHWVRQAPGKGREWVSGISWNGGSMGYAESVKGRFTISRDNAKNSLYLQMNSLRAEDSALYYCVKDKGPGLTGTTADYYGMDVWGQGTTVTVSS

SEQ ID NO: 902 - protein, 5 aa, Homo sapiens
DYAMH

SEQ ID NO: 903 - protein, 17 aa, Homo sapiens
GISWNGGSMGYADSVKD

SEQ ID NO: 904 - protein, 18 aa, Homo sapiens
DKGPGLIGSTADYHGLDV

SEQ ID NO: 905 - protein, 127 aa, Homo sapiens
EVQLVESGGGLVQPGRSLRLSCAASGFTFDDYAMHWVRQAPGKGLEWVSGISWNGGSMGYADSVKDRFTISRDNAKNSLYLQMNRLRAEDTALYYCVKDKGPGLIGSTADYHGLDVWGQGTTVTVSS

SEQ ID NO: 906 - protein, 5 aa, Homo sapiens
SYAMH

SEQ ID NO: 907 - protein, 17 aa, Homo sapiens
GISWNSGSMGYAESVKG

SEQ ID NO: 908 - protein, 18 aa, Homo sapiens
DKGPGLTGTTADYYGMDV

SEQ ID NO: 909 - protein, 127 aa, Homo sapiens
EVQLVESGGGVVQPGRSLRLSCAASGFTFSSYAMHWVRQAPGKGREWVSGISWNSGSMGYAESVKGRFTISRDNAKNSLYLQMNSLRAEDSALYYCVKDKGPGLTGTTADYYGMDVWGQGTTVTVSS

SEQ ID NO: 910 - protein, 5 aa, Homo sapiens
DYAMH

SEQ ID NO: 911 - protein, 17 aa, Homo sapiens
GISWNGGSMGYAESVKG

SEQ ID NO: 912 - protein, 18 aa, Homo sapiens
DKGPGLTGTTADYYGMDV

SEQ ID NO: 913 - protein, 127 aa, Homo sapiens
EVQLVESGGGVIQPGRSLRLSCAASGFTFDDYAMHWVRQAPGKGREWVSGISWNGGSMGYAESVKGRFTISRDNAQNSLYLQMNSLRAEDSALYYCVKDKGPGLTGTTADYYGMDVWGQGTTVTVSS

SEQ ID NO: 914 - protein, 5 aa, Homo sapiens
DYAMH

SEQ ID NO: 915 - protein, 17 aa, Homo sapiens
GISWNSGSMGYADSVKD

SEQ ID NO: 916 - protein, 18 aa, Homo sapiens
DKGPGLIGSTADYHGLDV

SEQ ID NO: 917 - protein, 127 aa, Homo sapiens
EVQLVESGGGLVQPGRSLRLSCAASGFTFDDYAMHWVRQAPGKGLEWVSGISWNSGSMGYADSVKDRFTISRDNAKNSLYLQMNSLRAEDTALYYCVKDKGPGLIGSTADYHGLDVWGQGTTVTVSS

SEQ ID NO: 918 - protein, 5 aa, Homo sapiens
DYAMH

SEQ ID NO: 919 - protein, 17 aa, Homo sapiens
GISWNGGSMGYAESVKG

SEQ ID NO: 920 - protein, 18 aa, Homo sapiens
DKGPGLIGSTADYYGMDV

SEQ ID NO: 921 - protein, 127 aa, Homo sapiens
EVQLVESGGGCVQPGRSLRISCAASGFTFDDYAMHWVRQAPGKGREWVSGISWNGGSMGYAESVKGRFTISRDNAKNSLYLQMNSLRAEDSALYYCVKDKGPGLIGSTADYYGMDVWGQGTTVTVSS

SEQ ID NO: 922 - protein, 5 aa, Homo sapiens
DYAMH

SEQ ID NO: 923 - protein, 17 aa, Homo sapiens
GISWNGGSMGYAESVKG

SEQ ID NO: 924 - protein, 18 aa, Homo sapiens
DKGPGLTGTTADYYGMDV

SEQ ID NO: 925 - protein, 127 aa, Homo sapiens
EVQLVESGGGLVQPGRSLRLSCAASGFTFADYAMHWVRQAPGKGREWVSGISWNGGSMGYAESVKGRFTISRDNAKNSLYLQMNSLRAEDSALYYCVKDKGPGLTGTTADYYGMDVWGQGTTVTVSS

SEQ ID NO: 926 - protein, 5 aa, Homo sapiens
DYAMH

SEQ ID NO: 927 - protein, 17 aa, Homo sapiens
GISWNGGSMGYAESVKG

SEQ ID NO: 928 - protein, 18 aa, Homo sapiens
DKGPGLIGSTADYYGLDV

SEQ ID NO: 929 - protein, 127 aa, Homo sapiens
EVQLLESGGGFVQPGRSLRISCAASGFTFDDYAMHWVRQAPGKDLEWVSGISWNGGSMGYAESVKGRFTISRDNAKNSLYLKMNSLRVEDTALYYCVKDKGPGLIGSTADYYGLDVWGQGTTVTVSS

SEQ ID NO: 930 - protein, 5 aa, Homo sapiens
DYAMH

SEQ ID NO: 931 - protein, 17 aa, Homo sapiens
GISWNGGSMGYADSVKD

SEQ ID NO: 932 - protein, 18 aa, Homo sapiens
DKGPGLTGSTADYHGMDV

SEQ ID NO: 933 - protein, 127 aa, Homo sapiens
QVQLVESGGGLVQPGRSLRLSCAASGFTFDDYAMHWVRQAPGKGREWVSGISWNGGSMGYADSVKDRFTISRDNAKNSLYLQMNSLRAEDTALYYCVKDKGPGLTGSTADYHGMDVWGQGTTVTVSS

SEQ ID NO: 934 - protein, 5 aa, Homo sapiens
DYAMH

SEQ ID NO: 935 - protein, 17 aa, Homo sapiens
GISWNGGSMGYAASVKG

SEQ ID NO: 936 - protein, 18 aa, Homo sapiens
DKGPGLIGSTADYYGLDV

SEQ ID NO: 937 - protein, 127 aa, Homo sapiens
QVQLVESGGGLVQPGRSLRLSCAASGFTFDDYAMHWVRQAPGKDLEWVSGISWNGGSMGYAASVKGRFTISRDNAQNSLYLQMNSLRAEDTALYYCVKDKGPGLIGSTADYYGLDVWGQGTTVTVSS

SEQ ID NO: 938 - protein, 5 aa, Homo sapiens
GYAMH

SEQ ID NO: 939 - protein, 17 aa, Homo sapiens
GISWNSGSMGYAESVKG

SEQ ID NO: 940 - protein, 18 aa, Homo sapiens
DKGPGLTGSTADYYGMDV

SEQ ID NO: 941 - protein, 127 aa, Homo sapiens
EVQLVESGGGLVQPGRSLRLSCAASGFTFDGYAMHWVRQAPGKGREWVSGISWNSGSMGYAESVKGRFTISRDNAKNSLYLQMNSLRAEDSALYYCVKDKGPGLTGSTADYYGMDVWGQGTTVTVSS

SEQ ID NO: 942 - protein, 5 aa, Homo sapiens
DYAMH

SEQ ID NO: 943 - protein, 17 aa, Homo sapiens
GISWNSGSMGYAESVKG

SEQ ID NO: 944 - protein, 18 aa, Homo sapiens
DKGPGLIGSTADYYGMDV

SEQ ID NO: 945 - protein, 127 aa, Homo sapiens
EVQLLESGGGLVQPGRSLRLSCTASGFTFDDYAMHWVRQAPGKGREWVSGISWNSGSMGYAESVKGRFTISRDNAKNSLYLQMNSLRAEDSALYYCVKDKGPGLIGSTADYYGMDVWGQGTTVTVSS

SEQ ID NO: 946 - protein, 5 aa, Homo sapiens
DYAMH

SEQ ID NO: 947 - protein, 17 aa, Homo sapiens
GISWNGGSMGYAESVKG

SEQ ID NO: 948 - protein, 18 aa, Homo sapiens
DKGPGLIGSTADYYGMDV

SEQ ID NO: 949 - protein, 127 aa, Homo sapiens
QVQLVESGGGLVQPGRSLRLSCAASGFTFDDYAMHWVRQAPGKGREWVSGISWNGGSMGYAESVKGRFTISRDNAKNSLYLQMNSLRAEDSALYYCVKDKGPGLIGSTADYYGMDVWGQGTTVTVSS

SEQ ID NO: 950 - protein, 5 aa, Homo sapiens
DYAMH

SEQ ID NO: 951 - protein, 17 aa, Homo sapiens
GISWNSGSMGYAASVKD

SEQ ID NO: 952 - protein, 18 aa, Homo sapiens
DKGPGLIGSTADYHGLDV

SEQ ID NO: 953 - protein, 127 aa, Homo sapiens
EVQLLESGGGLVQPGGSLRLSCAASGFTFDDYAMHWVRQAPGKGLEWVSGISWNSGSMGYAASVKDRFTISRDNAKNSLYLQMNSLTTEDTALYYCVKDKGPGLIGSTADYHGLDVWGQGTTVTVSS

SEQ ID NO: 954 - protein, 5 aa, Homo sapiens
DYAMH

SEQ ID NO: 955 - protein, 17 aa, Homo sapiens
GISWNGGSMGYAASVKG

SEQ ID NO: 956 - protein, 18 aa, Homo sapiens
DKGPGLIGSTADYYGLDV

SEQ ID NO: 957 - protein, 127 aa, Homo sapiens
QVQLVESGGGLVQPGRSLRLSCAASGFTFDDYAMHWVRQAPGKDLEWVSGISWNGGSMGYAASVKGRFTISRDNAKNSLYLQMNSLRAEDTALYYCVKDKGPGLIGSTADYYGLDVWGQGTTVTVSS

SEQ ID NO: 958 - protein, 5 aa, Homo sapiens
DYAMH

SEQ ID NO: 959 - protein, 17 aa, Homo sapiens
GISWNGGSMGYADSVKG

SEQ ID NO: 960 - protein, 18 aa, Homo sapiens
EKGPGLTGSTADYYGLDV

SEQ ID NO: 961 - protein, 127 aa, Homo sapiens
EVQLVESGGGLVQPGRSLRLSCAASGFTFDDYAMHWVRQAPGKDLEWVSGISWNGGSMGYADSVKGRFTISRDNAKNSLYLQMNSLRAEDTALYYCVREKGPGLTGSTADYYGLDVWGQGTMVTVSS

SEQ ID NO: 962 - protein, 5 aa, Homo sapiens
DYAMH

SEQ ID NO: 963 - protein, 17 aa, Homo sapiens
GISWNGGSMGYADSVKG

SEQ ID NO: 964 - protein, 18 aa, Homo sapiens
EKGPGLTGSTADYYGLDV

SEQ ID NO: 965 - protein, 127 aa, Homo sapiens; identical to SEQ ID NO: 961

SEQ ID NO: 966 - protein, 5 aa, Homo sapiens
DYAMH

SEQ ID NO: 967 - protein, 17 aa, Homo sapiens
GISWNGGSMGYAASVKG

SEQ ID NO: 968 - protein, 18 aa, Homo sapiens
EKGPGLTGSTADYYGLDV

SEQ ID NO: 969 - protein, 127 aa, Homo sapiens
EVQLVESGGGLVQPGRSLRLSCAASGFTFDDYAMHWVRQAPGKDLEWVSGISWNGGSMGYAASVKGRFTISRDNAKNSLYLQMNSLRAEDTALYYCVREKGPGLTGSTADYYGLDVWGQGTMVTVSS

SEQ ID NO: 970 - protein, 5 aa, Homo sapiens
DYAMH

SEQ ID NO: 971 - protein, 17 aa, Homo sapiens
GISWNGGSMGYAASVKG

SEQ ID NO: 972 - protein, 18 aa, Homo sapiens
EKGPGLTGSTADYYGLDA

SEQ ID NO: 973 - protein, 127 aa, Homo sapiens
EVQLVESGGGLVQPGRSLRLSCAASGFTFDDYAMHWVRQAPGKDLEWVSGISWNGGSMGYAASVKGRFTISRDNAKNSLYLQMNSLRAEDTALYYCVREKGPGLTGSTADYYGLDAWGQGTMVTVSS

SEQ ID NO: 974 - protein, 5 aa, Homo sapiens
DYAMH

SEQ ID NO: 975 - protein, 17 aa, Homo sapiens
GISWNSGSMGYAASVKG

SEQ ID NO: 976 - protein, 18 aa, Homo sapiens
EKGPGLTGSTADYYGLDV

SEQ ID NO: 977 - protein, 127 aa, Homo sapiens
EVQLVESGGGLVQPGRSLRLSCAASGFTFDDYAMHWVRQAPGKDLEWVSGISWNSGSMGYAASVKGRFTISRDNAKNSLYLQMNSLRAEDTALYYCVREKGPGLTGSTADYYGLDVWGQGTMVTVSS

SEQ ID NO: 978 - protein, 5 aa, Homo sapiens
DYAMH

SEQ ID NO: 979 - protein, 17 aa, Homo sapiens
GISWNSGSMGYAASVKG

SEQ ID NO: 980 - protein, 18 aa, Homo sapiens
EKGPGLTGSTADYYGLDA

SEQ ID NO: 981 - protein, 127 aa, Homo sapiens
EVQLVESGGGLVQPGRSLRLSCAASGFTFDDYAMHWVRQAPGKDLEWVSGISWNSGSMGYAASVKGRFTISRDNAKNSLYLQMNSLRAEDTALYYCVREKGPGLTGSTADYYGLDAWGQGTMVTVSS

SEQ ID NO: 982 - protein, 5 aa, Homo sapiens
DYAMH

SEQ ID NO: 983 - protein, 17 aa, Homo sapiens
GISWNGGSQGYAASVKG

SEQ ID NO: 984 - protein, 18 aa, Homo sapiens
EKGPGLTGSTADYYGLDA

SEQ ID NO: 985 - protein, 127 aa, Homo sapiens
EVQLVESGGGLVQPGRSLRLSCAASGFTFDDYAMHWVRQAPGKDLEWVSGISWNGGSQGYAASVKGRFTISRDNAKNSLYLQMNSLRAEDTALYYCVREKGPGLTGSTADYYGLDAWGQGTMVTVSS

SEQ ID NO: 986 - protein, 5 aa, Homo sapiens
DYAMH

SEQ ID NO: 987 - protein, 17 aa, Homo sapiens
GISWNGGSMGYADSVKG

SEQ ID NO: 988 - protein, 18 aa, Homo sapiens
EKGPGLTGSTADYYGLDA

SEQ ID NO: 989 - protein, 127 aa, Homo sapiens
EVQLVESGGGLVQPGRSLRLSCAASGFTFDDYAMHWVRQAPGKDLEWVSGISWNGGSMGYADSVKGRFTISRDNAKNSLYLQMNSLRAEDTALYYCVREKGPGLTGSTADYYGLDAWGQGTMVTVSS

SEQ ID NO: 990 - protein, 5 aa, Homo sapiens
DYAMH

SEQ ID NO: 991 - protein, 17 aa, Homo sapiens
GISWNGGSRGYAASVKG

SEQ ID NO: 992 - protein, 18 aa, Homo sapiens
EKGPGLTGSTADYYGLDA

SEQ ID NO: 993 - protein, 127 aa, Homo sapiens
EVQLVESGGGLVQPGRSLRLSCAASGFTFDDYAMHWVRQAPGKDLEWVSGISWNGGSRGYAASVKGRFTISRDNAKNSLYLQMNSLRAEDTALYYCVREKGPGLTGSTADYYGLDAWGQGTMVTVSS

SEQ ID NO: 994 - protein, 5 aa, Homo sapiens
DYAMH

SEQ ID NO: 995 - protein, 17 aa, Homo sapiens
GISWNAGSMGYAASVKG

SEQ ID NO: 996 - protein, 18 aa, Homo sapiens
EKGPGLTGSTADYYGLDA

SEQ ID NO: 997 - protein, 127 aa, Homo sapiens
EVQLVESGGGLVQPGRSLRLSCAASGFTFDDYAMHWVRQAPGKDLEWVSGISWNAGSMGYAASVKGRFTISRDNAKNSLYLQMNSLRAEDTALYYCVREKGPGLTGSTADYYGLDAWGQGTMVTVSS

SEQ ID NO: 998 - protein, 5 aa, Homo sapiens
DYAMH

SEQ ID NO: 999 - protein, 17 aa, Homo sapiens
GISWNSGSMGYADSVKG

SEQ ID NO: 1000 - protein, 18 aa, Homo sapiens
EKGPGLTGSTADYYGLDV

SEQ ID NO: 1001 - protein, 127 aa, Homo sapiens
EVQLVESGGGLVQPGRSLRLSCAASGFTFDDYAMHWVRQAPGKDLEWVSGISWNSGSMGYADSVKGRFTISRDNAKNSLYLQMNSLRAEDTALYYCVREKGPGLTGSTADYYGLDVWGQGTMVTVSS

SEQ ID NO: 1002 - protein, 5 aa, Homo sapiens
DYAGH

SEQ ID NO: 1003 - protein, 17 aa, Homo sapiens
GISWNGGSMGYAASVKG

SEQ ID NO: 1004 - protein, 18 aa, Homo sapiens
EKGPGLTGSTADYYGLDA

SEQ ID NO: 1005 - protein, 127 aa, Homo sapiens
EVQLVESGGGLVQPGRSLRLSCAASGFTFDDYAGHWVRQAPGKDLEWVSGISWNGGSMGYAASVKGRFTISRDNAKNSLYLQMNSLRAEDTALYYCVREKGPGLTGSTADYYGLDAWGQGTMVTVSS

SEQ ID NO: 1006 - protein, 5 aa, Homo sapiens
DYALH

SEQ ID NO: 1007 - protein, 17 aa, Homo sapiens
GISWNGGSMGYAASVKG

SEQ ID NO: 1008 - protein, 18 aa, Homo sapiens
EKGPGLTGSTADYYGLDA

SEQ ID NO: 1009 - protein, 127 aa, Homo sapiens
EVQLVESGGGLVQPGRSLRLSCAASGFTFDDYALHWVRQAPGKDLEWVSGISWNGGSMGYAASVKGRFTISRDNAKNSLYLQMNSLRAEDTALYYCVREKGPGLTGSTADYYGLDAWGQGTMVTVSS

SEQ ID NO: 1010 - protein, 5 aa, Homo sapiens
DYAMH

SEQ ID NO: 1011 - protein, 17 aa, Homo sapiens
GISWNSGSMGYADSVKG

SEQ ID NO: 1012 - protein, 18 aa, Homo sapiens
EKGPGLTGSTADYYGLDA

SEQ ID NO: 1013 - protein, 127 aa, Homo sapiens
EVQLVESGGGLVQPGRSLRLSCAASGFTFDDYAMHWVRQAPGKDLEWVSGISWNSGSMGYADSVKGRFTISRDNAKNSLYLQMNSLRAEDTALYYCVREKGPGLTGSTADYYGLDAWGQGTMVTVSS

SEQ ID NO: 1014 - protein, 5 aa, Homo sapiens
DYAMH

SEQ ID NO: 1015 - protein, 17 aa, Homo sapiens
GISWNGGSYGYADSVKG

SEQ ID NO: 1016 - protein, 18 aa, Homo sapiens
EKGPGLTGSTADYYGLDA

SEQ ID NO: 1017 - protein, 127 aa, Homo sapiens
EVQLVESGGGLVQPGRSLRLSCAASGFTFDDYAMHWVRQAPGKDLEWVSGISWNGGSYGYADSVKGRFTISRDNAKNSLYLQMNSLRAEDTALYYCVREKGPGLTGSTADYYGLDAWGQGTMVTVSS

SEQ ID NO: 1018 - protein, 5 aa, Homo sapiens
DYAMH

SEQ ID NO: 1019 - protein, 17 aa, Homo sapiens
GISWNGGSQGYADSVKG

SEQ ID NO: 1020 - protein, 18 aa, Homo sapiens
EKGPGLTGSTADYYGLDA

SEQ ID NO: 1021 - protein, 127 aa, Homo sapiens
EVQLVESGGGLVQPGRSLRLSCAASGFTFDDYAMHWVRQAPGKDLEWVSGISWNGGSQGYADSVKGRFTISRDNAKNSLYLQMNSLRAEDTALYYCVREKGPGLTGSTADYYGLDAWGQGTMVTVSS

SEQ ID NO: 1022 - protein, 5 aa, Homo sapiens
DYAMH

SEQ ID NO: 1023 - protein, 17 aa, Homo sapiens
GISWNGGSKGYADSVKG

SEQ ID NO: 1024 - protein, 18 aa, Homo sapiens
EKGPGLTGSTADYYGLDA

SEQ ID NO: 1025 - protein, 127 aa, Homo sapiens
EVQLVESGGGLVQPGRSLRLSCAASGFTFDDYAMHWVRQAPGKDLEWVSGISWNGGSKGYADSVKGRFTISRDNAKNSLYLQMNSLRAEDTALYYCVREKGPGLTGSTADYYGLDAWGQGTMVTVSS

SEQ ID NO: 1026 - protein, 5 aa, Homo sapiens
DYAMH

SEQ ID NO: 1027 - protein, 17 aa, Homo sapiens
GISWNAGSMGYADSVKG

SEQ ID NO: 1028 - protein, 18 aa, Homo sapiens
EKGPGLTGSTADYYGLDA

SEQ ID NO: 1029 - protein, 127 aa, Homo sapiens
EVQLVESGGGLVQPGRSLRLSCAASGFTFDDYAMHWVRQAPGKDLEWVSGISWNAGSMGYADSVKGRFTISRDNAKNSLYLQMNSLRAEDTALYYCVREKGPGLTGSTADYYGLDAWGQGTMVTVSS

SEQ ID NO: 1030 - protein, 5 aa, Homo sapiens
DYAFH

SEQ ID NO: 1031 - protein, 17 aa, Homo sapiens
GISWNGGSMGYADSVKG

SEQ ID NO: 1032 - protein, 18 aa, Homo sapiens
EKGPGLTGSTADYYGLDA

SEQ ID NO: 1033 - protein, 127 aa, Homo sapiens
EVQLVESGGGLVQPGRSLRLSCAASGFTFDDYAFHWVRQAPGKDLEWVSGISWNGGSMGYADSVKGRFTISRDNAKNSLYLQMNSLRAEDTALYYCVREKGPGLTGSTADYYGLDAWGQGTMVTVSS

SEQ ID NO: 1034 - protein, 5 aa, Homo sapiens
DYALH

SEQ ID NO: 1035 - protein, 17 aa, Homo sapiens
GISWNGGSMGYADSVKG

SEQ ID NO: 1036 - protein, 18 aa, Homo sapiens
EKGPGLTGSTADYYGLDA

SEQ ID NO: 1037 - protein, 127 aa, Homo sapiens
EVQLVESGGGLVQPGRSLRLSCAASGFTFDDYALHWVRQAPGKDLEWVSGISWNGGSMGYADSVKGRFTISRDNAKNSLYLQMNSLRAEDTALYYCVREKGPGLTGSTADYYGLDAWGQGTMVTVSS

SEQ ID NO: 1038 - protein, 5 aa, Homo sapiens
DYALH

SEQ ID NO: 1039 - protein, 17 aa, Homo sapiens
GISWNGGSYGYADSVKG

SEQ ID NO: 1040 - protein, 18 aa, Homo sapiens
EKGPGLTGSTADYYGLDA

SEQ ID NO: 1041 - protein, 127 aa, Homo sapiens
EVQLVESGGGLVQPGRSLRLSCAASGFTFDDYALHWVRQAPGKDLEWVSGISWNGGSYGYADSVKGRFTISRDNAKNSLYLQMNSLRAEDTALYYCVREKGPGLTGSTADYYGLDAWGQGTMVTVSS

SEQ ID NO: 1042 - protein, 5 aa, Homo sapiens
DYALH

SEQ ID NO: 1043 - protein, 17 aa, Homo sapiens
GISWNGGSQGYADSVKG

SEQ ID NO: 1044 - protein, 18 aa, Homo sapiens
EKGPGLTGSTADYYGLDA

SEQ ID NO: 1045 - protein, 127 aa, Homo sapiens
EVQLVESGGGLVQPGRSLRLSCAASGFTFDDYALHWVRQAPGKDLEWVSGISWNGGSQGYADSVKGRFTISRDNAKNSLYLQMNSLRAEDTALYYCVREKGPGLTGSTADYYGLDAWGQGTMVTVSS

SEQ ID NO: 1046 - protein, 5 aa, Homo sapiens
DYAFH

SEQ ID NO: 1047 - protein, 17 aa, Homo sapiens
GISWNGGSYGYADSVKG

SEQ ID NO: 1048 - protein, 18 aa, Homo sapiens
EKGPGLTGSTADYYGLDA

SEQ ID NO: 1049 - protein, 127 aa, Homo sapiens
EVQLVESGGGLVQPGRSLRLSCAASGFTFDDYAFHWVRQAPGKDLEWVSGISWNGGSYGYADSVKGRFTISRDNAKNSLYLQMNSLRAEDTALYYCVREKGPGLTGSTADYYGLDAWGQGTMVTVSS

SEQ ID NO: 1050 - protein, 5 aa, Homo sapiens
DYAFH

SEQ ID NO: 1051 - protein, 17 aa, Homo sapiens
GISWNGGSQGYADSVKG

SEQ ID NO: 1052 - protein, 18 aa, Homo sapiens
EKGPGLTGSTADYYGLDA

SEQ ID NO: 1053 - protein, 127 aa, Homo sapiens
EVQLVESGGGLVQPGRSLRLSCAASGFTFDDYAFHWVRQAPGKDLEWVSGISWNGGSQGYADSVKGRFTISRDNAKNSLYLQMNSLRAEDTALYYCVREKGPGLTGSTADYYGLDAWGQGTMVTVSS

SEQ ID NO: 1054 - protein, 5 aa, Homo sapiens
DYAFH

SEQ ID NO: 1055 - protein, 17 aa, Homo sapiens
GISWNAGSYGYADSVKG

SEQ ID NO: 1056 - protein, 18 aa, Homo sapiens
EKGPGLTGSTADYYGLDA

SEQ ID NO: 1057 - protein, 127 aa, Homo sapiens
EVQLVESGGGLVQPGRSLRLSCAASGFTFDDYAFHWVRQAPGKDLEWVSGISWNAGSYGYADSVKGRFTISRDNAKNSLYLQMNSLRAEDTALYYCVREKGPGLTGSTADYYGLDAWGQGTMVTVSS

SEQ ID NO: 1058 - protein, 5 aa, Homo sapiens
DYALH

SEQ ID NO: 1059 - protein, 17 aa, Homo sapiens
GISWNSGSYGYADSVKG

SEQ ID NO: 1060 - protein, 18 aa, Homo sapiens
EKGPGLTGSTADYYGLDA

SEQ ID NO: 1061 - protein, 127 aa, Homo sapiens
EVQLVESGGGLVQPGRSLRLSCAASGFTFDDYALHWVRQAPGKDLEWVSGISWNSGSYGYADSVKGRFTISRDNAKNSLYLQMNSLRAEDTALYYCVREKGPGLTGSTADYYGLDAWGQGTMVTVSS

SEQ ID NO: 1062 - protein, 5 aa, Homo sapiens
DYALH

SEQ ID NO: 1063 - protein, 17 aa, Homo sapiens
GISWNAGSQGYADSVKG

SEQ ID NO: 1064 - protein, 18 aa, Homo sapiens
EKGPGLTGSTADYYGLDA

SEQ ID NO: 1065 - protein, 127 aa, Homo sapiens
EVQLVESGGGLVQPGRSLRLSCAASGFTFDDYALHWVRQAPGKDLEWVSGISWNAGSQGYADSVKGRFTISRDNAKNSLYLQMNSLRAEDTALYYCVREKGPGLTGSTADYYGLDAWGQGTMVTVSS

SEQ ID NO: 1066 - protein, 5 aa, Homo sapiens
DYALH

SEQ ID NO: 1067 - protein, 17 aa, Homo sapiens
GISWNAGSYGYADSVKG

SEQ ID NO: 1068 - protein, 18 aa, Homo sapiens
EKGPGLTGSTADYYGLDA

SEQ ID NO: 1069 - protein, 127 aa, Homo sapiens
EVQLVESGGGLVQPGRSLRLSCAASGFTFDDYALHWVRQAPGKDLEWVSGISWNAGSYGYADSVKGRFTISRDNAKNSLYLQMNSLRAEDTALYYCVREKGPGLTGSTADYYGLDAWGQGTMVTVSS

SEQ ID NO: 1070 - protein, 5 aa, Homo sapiens
DYAFH

SEQ ID NO: 1071 - protein, 17 aa, Homo sapiens
GISWNSGSYGYADSVKG

SEQ ID NO: 1072 - protein, 18 aa, Homo sapiens
EKGPGLTGSTADYYGLDA

SEQ ID NO: 1073 - protein, 127 aa, Homo sapiens
EVQLVESGGGLVQPGRSLRLSCAASGFTFDDYAFHWVRQAPGKDLEWVSGISWNSGSYGYADSVKGRFTISRDNAKNSLYLQMNSLRAEDTALYYCVREKGPGLTGSTADYYGLDAWGQGTMVTVSS

SEQ ID NO: 1074 - protein, 5 aa, Homo sapiens
DYALH

SEQ ID NO: 1075 - protein, 17 aa, Homo sapiens
GISWNSGSQGYADSVKG

SEQ ID NO: 1076 - protein, 18 aa, Homo sapiens
EKGPGLTGSTADYYGLDA

SEQ ID NO: 1077 - protein, 127 aa, Homo sapiens
EVQLVESGGGLVQPGRSLRLSCAASGFTFDDYALHWVRQAPGKDLEWVSGISWNSGSQGYADSVKGRFTISRDNAKNSLYLQMNSLRAEDTALYYCVREKGPGLTGSTADYYGLDAWGQGTMVTVSS

SEQ ID NO: 1078 - protein, 5 aa, Homo sapiens
DYAFH

SEQ ID NO: 1079 - protein, 17 aa, Homo sapiens
GISWNSGSQGYADSVKG

SEQ ID NO: 1080 - protein, 18 aa, Homo sapiens
EKGPGLTGSTADYYGLDA

SEQ ID NO: 1081 - protein, 127 aa, Homo sapiens
EVQLVESGGGLVQPGRSLRLSCAASGFTFDDYAFHWVRQAPGKDLEWVSGISWNSGSQGYADSVKGRFTISRDNAKNSLYLQMNSLRAEDTALYYCVREKGPGLTGSTADYYGLDAWGQGTMVTVSS

SEQ ID NO: 1082 - protein, 5 aa, Homo sapiens
DYAFH

SEQ ID NO: 1083 - protein, 17 aa, Homo sapiens
GISWNAGSQGYADSVKG

SEQ ID NO: 1084 - protein, 18 aa, Homo sapiens
EKGPGLTGSTADYYGLDA

SEQ ID NO: 1085 - protein, 127 aa, Homo sapiens
EVQLVESGGGLVQPGRSLRLSCAASGFTFDDYAFHWVRQAPGKDLEWVSGISWNAGSQGYADSVKGRFTISRDNAKNSLYLQMNSLRAEDTALYYCVREKGPGLTGSTADYYGLDAWGQGTMVTVSS

SEQ ID NO: 1086 - protein, 5 aa, Homo sapiens
DYAMS

SEQ ID NO: 1087 - protein, 17 aa, Homo sapiens
GITWNGGSTGYADSVKD

SEQ ID NO: 1088 - protein, 14 aa, Homo sapiens
DKYSYAWSYDGFDI

SEQ ID NO: 1089 - protein, 123 aa, Homo sapiens
EVQLVESGGGVVRPGGSLRLSCAASGFTFDDYAMSWVRQAPGKGLEWVSGITWNGGSTGYADSVKDRFTISRDNAKNSLYLQMNSLRAEDTALYYCVRDKYSYAWSYDGFDIWGQGTMVTVSS

SEQ ID NO: 1090 - protein, 5 aa, Homo sapiens
DYGMS

SEQ ID NO: 1091 - protein, 17 aa, Homo sapiens
GISRNGGSAGYSDSAKD

SEQ ID NO: 1092 - protein, 14 aa, Homo sapiens
EKYSSGWSYDDFDI

SEQ ID NO: 1093 - protein, 123 aa, Homo sapiens
EVQLLESGGGVVRPGGSLRLSCAASGFTFDDYGMSWVRQPPGKGLEWVSGISRNGGSAGYSDSAKDRFTISRDNAKNSLYLQMNSLRADDTAMYYCAREKYSSGWSYDDFDIWGQGTMVTVSS

SEQ ID NO: 1094 - protein, 5 aa, Homo sapiens
DYGMS

SEQ ID NO: 1095 - protein, 17 aa, Homo sapiens
GISRNGGSAGYSDSAKD

SEQ ID NO: 1096 - protein, 14 aa, Homo sapiens
EKYSSGWSYDDFDI

SEQ ID NO: 1097 - protein, 123 aa, Homo sapiens
QVQLVESGGGVVRPGGSLRLSCAASGFTFDDYGMSWVRQSPGKGLEWVSGISRNGGSAGYSDSAKDRFTISRDNAKNSLYLQMNSLRADDTAMYYCAREKYSSGWSYDDFDIWGQGTMVTVSS

SEQ ID NO: 1098 - protein, 5 aa, Homo sapiens
DYGMS

SEQ ID NO: 1099 - protein, 17 aa, Homo sapiens
GISRNGGSAGYSDSAKD

SEQ ID NO: 1100 - protein, 14 aa, Homo sapiens
EKYSSGWSYDDFDI

SEQ ID NO: 1101 - protein, 123 aa, Homo sapiens
QVQLVESGGGVVRPGGSLRLSCAASGFTFDDYGMSWVRQPPGKGLEWVSGISRNGGSAGYSDSAKDRFTISRDNAKNSLYLQMNSLRADDTAMYYCAREKYSSGWSYDDFDIWGQGTMVTVSS

SEQ ID NO: 1102 - protein, 5 aa, Homo sapiens
DYGMS

SEQ ID NO: 1103 - protein, 17 aa, Homo sapiens
GISRNGGSAGYSDSAKD

SEQ ID NO: 1104 - protein, 14 aa, Homo sapiens
EKYSSGWSYDDFDI

SEQ ID NO: 1105 - protein, 123 aa, Homo sapiens
EVQLVESGGGVVRPGGSLRLSCAASGFTFDDYGMSWVRQPPGKGLEWVSGISRNGGSAGYSDSAKDRFTISRDNAKNSLYLQMNSLRADDTAMYYCAREKYSSGWSYDDFDIWGQGTMVTVSS

SEQ ID NO: 1106 - protein, 5 aa, Homo sapiens
DYGMS

SEQ ID NO: 1107 - protein, 17 aa, Homo sapiens
GISRNGGSTGYADSVKD

SEQ ID NO: 1108 - protein, 14 aa, Homo sapiens
DPYSSGWSYDSFDI

SEQ ID NO: 1109 - protein, 123 aa, Homo sapiens
QVQLVESGGGVVRLGGSLRLSCAASGFSFVDYGMSWVRQAPGQGLEWVSGISRNGGSTGYADSVKDRFTISRDNAKNTLYLQMNSLRAEDTALYYCARDPYSSGWSYDSFDIWGQGTMVTVSS

SEQ ID NO: 1110 - protein, 5 aa, Homo sapiens
DYGMS

SEQ ID NO: 1111 - protein, 17 aa, Homo sapiens
GISRNGGSTGYTASVKD

SEQ ID NO: 1112 - protein, 14 aa, Homo sapiens
EKYSSGWSYDDFDI

SEQ ID NO: 1113 - protein, 123 aa, Homo sapiens
QVQLVESGGGVVRPGGSLRLSCAASGFTFDDYGMSWVRQAPGKGLEWVSGISRNGGSTGYTASVKDRFTISRDNAKNSLYLQMNSLRADDTAMYYCAREKYSSGWSYDDFDIWGQGTMVTVSS

SEQ ID NO: 1114 - protein, 5 aa, Homo sapiens
DYAMS

SEQ ID NO: 1115 - protein, 17 aa, Homo sapiens
GISWNGGSAGYADSVKD

SEQ ID NO: 1116 - protein, 14 aa, Homo sapiens
DPHSSAWSYDAFDI

SEQ ID NO: 1117 - protein, 123 aa, Homo sapiens
QVQLVESGGGLVQPGGSLRLSCAASGFTFDDYAMSWVRQAPGKGLEWVSGISWNGGSAGYADSVKDRFTISRDNAKNSLYLQMNSLRAEDTALYYCARDPHSSAWSYDAFDIWGQGTMVTVSS

SEQ ID NO: 1118 - protein, 5 aa, Homo sapiens
DYAMS

SEQ ID NO: 1119 - protein, 17 aa, Homo sapiens
GISWNGGSKGYADSVKD

SEQ ID NO: 1120 - protein, 14 aa, Homo sapiens
DPYSGAWSYDAFDI

SEQ ID NO: 1121 - protein, 123 aa, Homo sapiens
QVQLVESGGGVVRPGGSLRLSCAASGFTFDDYAMSWVRQAPGKGLEWVSGISWNGGSKGYADSVKDRFTISRDNAKNSLYLQMNSLRAEDTALYYCARDPYSGAWSYDAFDIWGQGTMVTVSS

SEQ ID NO: 1122 - protein, 5 aa, Homo sapiens
DYAMS

SEQ ID NO: 1123 - protein, 17 aa, Homo sapiens
GISWNGGSTGYADSVKD

SEQ ID NO: 1124 - protein, 14 aa, Homo sapiens
DPYSGAWSYDAFDI

SEQ ID NO: 1125 - protein, 123 aa, Homo sapiens
QVQLVESGGGVVRPGGSLRLSCAASGFTFDDYAMSWVRQAPGKGLEWVSGISWNGGSTGYADSVKDRFTISRDNAKNSLYLQMNSLRAEDTALYYCARDPYSGAWSYDAFDIWGQGTMVTVSS

SEQ ID NO: 1126 - protein, 5 aa, Homo sapiens
NYAMS

SEQ ID NO: 1127 - protein, 17 aa, Homo sapiens
GITWNGGSTGYADSVKD

SEQ ID NO: 1128 - protein, 14 aa, Homo sapiens
DKYSYAWSYDTFDI

SEQ ID NO: 1129 - protein, 123 aa, Homo sapiens
QVQLVESGGGVVRPGGSLRLSCAASGFTFDNYAMSWVRQAPGKGLEWVSGITWNGGSTGYADSVKDRFTISRDNAKNSLYLQMNSLRAEDTALYYCARDKYSYAWSYDTFDIRGQGTMVTVSS

SEQ ID NO: 1130 - protein, 5 aa, Homo sapiens
DYAMS

SEQ ID NO: 1131 - protein, 17 aa, Homo sapiens
GITWNAGSTGYADSVKG

SEQ ID NO: 1132 - protein, 14 aa, Homo sapiens
DKYSYAWSYDDFDI

SEQ ID NO: 1133 - protein, 123 aa, Homo sapiens
EVQLVESGGGVVRPGGSLRLSCAASGFTFDDYAMSWVRQAPGKGLEWVSGITWNAGSTGYADSVKGRFTISRDNAKNSLYLQMNSLRAEDTALYYCVRDKYSYAWSYDDFDIWGQGTMVTVSS

SEQ ID NO: 1134 - protein, 5 aa, Homo sapiens
DYAMS

SEQ ID NO: 1135 - protein, 17 aa, Homo sapiens
GITWNRGSTGYADSVKG

SEQ ID NO: 1136 - protein, 14 aa, Homo sapiens
DKYSYAWSYDDFDI

SEQ ID NO: 1137 - protein, 123 aa, Homo sapiens
EVQLVESGGGVVRPGGSLRLSCAASGFTFDDYAMSWVRQAPGKGLEWVSGITWNRGSTGYADSVKGRFTISRDNAKNSLYLQMNSLRAEDTALYYCVRDKYSYAWSYDDFDIWGQGTMVTVSS

SEQ ID NO: 1138 - protein, 5 aa, Homo sapiens
DYAFS

SEQ ID NO: 1139 - protein, 17 aa, Homo sapiens
GITWNGGSTGYADSVKG

SEQ ID NO: 1140 - protein, 14 aa, Homo sapiens
DKYSYAWSYDGFDI

SEQ ID NO: 1141 - protein, 123 aa, Homo sapiens
EVQLVESGGGVVRPGGSLRLSCAASGFTFDDYAFSWVRQAPGKGLEWVSGITWNGGSTGYADSVKGRFTISRDNAKNSLYLQMNSLRAEDTALYYCVRDKYSYAWSYDGFDIWGQGTMVTVSS

SEQ ID NO: 1142 - protein, 5 aa, Homo sapiens
DYAQS

SEQ ID NO: 1143 - protein, 17 aa, Homo sapiens
GITWNGGSTGYADSVKG

SEQ ID NO: 1144 - protein, 14 aa, Homo sapiens
DKYSYAWSYDGFDI

SEQ ID NO: 1145 - protein, 123 aa, Homo sapiens
EVQLVESGGGVVRPGGSLRLSCAASGFTFDDYAQSWVRQAPGKGLEWVSGITWNGGSTGYADSVKGRFTISRDNAKNSLYLQMNSLRAEDTALYYCVRDKYSYAWSYDGFDIWGQGTMVTVSS

SEQ ID NO: 1146 - protein, 5 aa, Homo sapiens
DYANS

SEQ ID NO: 1147 - protein, 17 aa, Homo sapiens
GITWNGGSTGYADSVKG

SEQ ID NO: 1148 - protein, 14 aa, Homo sapiens
DKYSYAWSYDGFDI

SEQ ID NO: 1149 - protein, 123 aa, Homo sapiens
EVQLVESGGGVVRPGGSLRLSCAASGFTFDDYANSWVRQAPGKGLEWVSGITWNGGSTGYADSVKGRFTISRDNAKNSLYLQMNSLRAEDTALYYCVRDKYSYAWSYDGFDIWGQGTMVTVSS

SEQ ID NO: 1150 - protein, 5 aa, Homo sapiens
DYAGS

SEQ ID NO: 1151 - protein, 17 aa, Homo sapiens
GITWNGGSTGYADSVKG

SEQ ID NO: 1152 - protein, 14 aa, Homo sapiens
DKYSYAWSYDGFDI

SEQ ID NO: 1153 - protein, 123 aa, Homo sapiens
EVQLVESGGGVVRPGGSLRLSCAASGFTFDDYAGSWVRQAPGKGLEWVSGITWNGGSTGYADSVKGRFTISRDNAKNSLYLQMNSLRAEDTALYYCVRDKYSYAWSYDGFDIWGQGTMVTVSS

SEQ ID NO: 1154 - protein, 5 aa, Homo sapiens
DYAES

SEQ ID NO: 1155 - protein, 17 aa, Homo sapiens
GITWNGGSTGYADSVKG

SEQ ID NO: 1156 - protein, 14 aa, Homo sapiens
DKYSYAWSYDGFDI

SEQ ID NO: 1157 - protein, 123 aa, Homo sapiens
EVQLVESGGGVVRPGGSLRLSCAASGFTFDDYAESWVRQAPGKGLEWVSGITWNGGSTGYADSVKGRFTISRDNAKNSLYLQMNSLRAEDTALYYCVRDKYSYAWSYDGFDIWGQGTMVTVSS

SEQ ID NO: 1158 - protein, 5 aa, Homo sapiens
DYAWS

SEQ ID NO: 1159 - protein, 17 aa, Homo sapiens
GITWNGGSTGYADSVKG

SEQ ID NO: 1160 - protein, 14 aa, Homo sapiens
DKYSYAWSYDGFDI

SEQ ID NO: 1161 - protein, 123 aa, Homo sapiens
EVQLVESGGGVVRPGGSLRLSCAASGFTFDDYAWSWVRQAPGKGLEWVSGITWNGGSTGYADSVKGRFTISRDNAKNSLYLQMNSLRAEDTALYYCVRDKYSYAWSYDGFDIWGQGTMVTVSS

SEQ ID NO: 1162 - protein, 5 aa, Homo sapiens
DYAVS

SEQ ID NO: 1163 - protein, 17 aa, Homo sapiens
GITWNGGSTGYADSVKG

SEQ ID NO: 1164 - protein, 14 aa, Homo sapiens
DKYSYAWSYDGFDI

SEQ ID NO: 1165 - protein, 123 aa, Homo sapiens
EVQLVESGGGVVRPGGSLRLSCAASGFTFDDYAVSWVRQAPGKGLEWVSGITWNGGSTGYADSVKGRFTISRDNAKNSLYLQMNSLRAEDTALYYCVRDKYSYAWSYDGFDIWGQGTMVTVSS

SEQ ID NO: 1166 - protein, 5 aa, Homo sapiens
DYALS

SEQ ID NO: 1167 - protein, 17 aa, Homo sapiens
GITWNGGSTGYADSVKG

SEQ ID NO: 1168 - protein, 14 aa, Homo sapiens
DKYSYAWSYDGFDI

SEQ ID NO: 1169 - protein, 123 aa, Homo sapiens
EVQLVESGGGVVRPGGSLRLSCAASGFTFDDYALSWVRQAPGKGLEWVSGITWNGGSTGYADSVKGRFTISRDNAKNSLYLQMNSLRAEDTALYYCVRDKYSYAWSYDGFDIWGQGTMVTVSS

SEQ ID NO: 1170 - protein, 5 aa, Homo sapiens
DYASS

SEQ ID NO: 1171 - protein, 17 aa, Homo sapiens
GITWNGGSTGYADSVKG

SEQ ID NO: 1172 - protein, 14 aa, Homo sapiens
DKYSYAWSYDGFDI

SEQ ID NO: 1173 - protein, 123 aa, Homo sapiens
EVQLVESGGGVVRPGGSLRLSCAASGFTFDDYASSWVRQAPGKGLEWVSGITWNGGSTGYADSVKGRFTISRDNAKNSLYLQMNSLRAEDTALYYCVRDKYSYAWSYDGFDIWGQGTMVTVSS

SEQ ID NO: 1174 - protein, 5 aa, Homo sapiens
DYARS

SEQ ID NO: 1175 - protein, 17 aa, Homo sapiens
GITWNGGSTGYADSVKG

SEQ ID NO: 1176 - protein, 14 aa, Homo sapiens
DKYSYAWSYDGFDI

SEQ ID NO: 1177 - protein, 123 aa, Homo sapiens
EVQLVESGGGVVRPGGSLRLSCAASGFTFDDYARSWVRQAPGKGLEWVSGITWNGGSTGYADSVKGRFTISRDNAKNSLYLQMNSLRAEDTALYYCVRDKYSYAWSYDGFDIWGQGTMVTVSS

SEQ ID NO: 1178 - protein, 5 aa, Homo sapiens
DYAMS

SEQ ID NO: 1179 - protein, 17 aa, Homo sapiens
GITWNSGSTGYADSVKD

SEQ ID NO: 1180 - protein, 14 aa, Homo sapiens
DKYSYAWSYDDFDI

SEQ ID NO: 1181 - protein, 123 aa, Homo sapiens
EVQLVESGGGVVRPGGSLRLSCAASGFTFDDYAMSWVRQAPGKGLEWVSGITWNSGSTGYADSVKDRFTISRDNAKNSLYLQMNSLRAEDTALYYCVRDKYSYAWSYDDFDIWGQGTMVTVSS

SEQ ID NO: 1182 - protein, 5 aa, Homo sapiens
DYAMS

SEQ ID NO: 1183 - protein, 17 aa, Homo sapiens
GITWNQGSTGYADSVKD

SEQ ID NO: 1184 - protein, 14 aa, Homo sapiens
DKYSYAWSYDDFDI

SEQ ID NO: 1185 - protein, 123 aa, Homo sapiens
EVQLVESGGGVVRPGGSLRLSCAASGFTFDDYAMSWVRQAPGKGLEWVSGITWNQGSTGYADSVKDRFTISRDNAKNSLYLQMNSLRAEDTALYYCVRDKYSYAWSYDDFDIWGQGTMVTVSS

SEQ ID NO: 1186 - protein, 5 aa, Homo sapiens
DYAMS

SEQ ID NO: 1187 - protein, 17 aa, Homo sapiens
GITWNHGSTGYADSVKD

SEQ ID NO: 1188 - protein, 14 aa, Homo sapiens
DKYSYAWSYDVFDI

SEQ ID NO: 1189 - protein, 123 aa, Homo sapiens
EVQLVESGGGVVRPGGSLRLSCAASGFTFDDYAMSWVRQAPGKGLEWVSGITWNHGSTGYADSVKDRFTISRDNAKNSLYLQMNSLRAEDTALYYCVRDKYSYAWSYDVFDIWGQGTMVTVSS

SEQ ID NO: 1190 - protein, 5 aa, Homo sapiens
DYAMS

SEQ ID NO: 1191 - protein, 17 aa, Homo sapiens
GITWNAGSTGYADSVKD

SEQ ID NO: 1192 - protein, 14 aa, Homo sapiens
DKYSYAWSYDDFDI

SEQ ID NO: 1193 - protein, 123 aa, Homo sapiens
EVQLVESGGGVVRPGGSLRLSCAASGFTFDDYAMSWVRQAPGKGLEWVSGITWNAGSTGYADSVKDRFTISRDNAKNSLYLQMNSLRAEDTALYYCVRDKYSYAWSYDDFDIWGQGTMVTVSS

SEQ ID NO: 1194 - protein, 5 aa, Homo sapiens
DYAMS

SEQ ID NO: 1195 - protein, 17 aa, Homo sapiens
GITWNGGSTGYADSVKG

SEQ ID NO: 1196 - protein, 14 aa, Homo sapiens
DKYSYAWSYDVFDI

SEQ ID NO: 1197 - protein, 123 aa, Homo sapiens
EVQLVESGGGVVRPGGSLRLSCAASGFTFDDYAMSWVRQAPGKGLEWVSGITWNGGSTGYADSVKGRFTISRDNAKNSLYLQMNSLRAEDTALYYCVRDKYSYAWSYDVFDIWGQGTMVTVSS

SEQ ID NO: 1198 - protein, 5 aa, Homo sapiens
DYAMS

SEQ ID NO: 1199 - protein, 17 aa, Homo sapiens
GITWNGGSTGYADSVKG

SEQ ID NO: 1200 - protein, 14 aa, Homo sapiens
DKYSYAWSYDDFDI

SEQ ID NO: 1201 - protein, 123 aa, Homo sapiens
EVQLVESGGGVVRPGGSLRLSCAASGFTFDDYAMSWVRQAPGKGLEWVSGITWNGGSTGYADSVKGRFTISRDNAKNSLYLQMNSLRAEDTALYYCVRDKYSYAWSYDDFDIWGQGTMVTVSS

SEQ ID NO: 1202 - protein, 5 aa, Homo sapiens
DYAMS

SEQ ID NO: 1203 - protein, 17 aa, Homo sapiens
GITWNKGSTGYADSVKD

SEQ ID NO: 1204 - protein, 14 aa, Homo sapiens
DKYSYAWSYDDFDI

SEQ ID NO: 1205 - protein, 123 aa, Homo sapiens
EVQLVESGGGVVRPGGSLRLSCAASGFTFDDYAMSWVRQAPGKGLEWVSGITWNKGSTGYADSVKDRFTISRDNAKNSLYLQMNSLRAEDTALYYCVRDKYSYAWSYDDFDIWGQGTMVTVSS

SEQ ID NO: 1206 - protein, 5 aa, Homo sapiens
DYAMS

SEQ ID NO: 1207 - protein, 17 aa, Homo sapiens
GITWNRGSTGYADSVKD

SEQ ID NO: 1208 - protein, 14 aa, Homo sapiens
DKYSYAWSYDDFDI

SEQ ID NO: 1209 - protein, 123 aa, Homo sapiens
EVQLVESGGGVVRPGGSLRLSCAASGFTFDDYAMSWVRQAPGKGLEWVSGITWNRGSTGYADSVKDRFTISRDNAKNSLYLQMNSLRAEDTALYYCVRDKYSYAWSYDDFDIWGQGTMVTVSS

SEQ ID NO: 1210 - protein, 5 aa, Homo sapiens
DYAIS

SEQ ID NO: 1211 - protein, 17 aa, Homo sapiens
GITWNGGSTGYADSVKD

SEQ ID NO: 1212 - protein, 14 aa, Homo sapiens
DKYSYAWSYDGFDI

SEQ ID NO: 1213 - protein, 123 aa, Homo sapiens
EVQLVESGGGVVRPGGSLRLSCAASGFTFDDYAISWVRQAPGKGLEWVSGITWNGGSTGYADSVKDRFTISRDNAKNSLYLQMNSLRAEDTALYYCVRDKYSYAWSYDGFDIWGQGTMVTVSS

SEQ ID NO: 1214 - protein, 5 aa, Homo sapiens
DYATS

SEQ ID NO: 1215 - protein, 17 aa, Homo sapiens
GITWNGGSTGYADSVKD

SEQ ID NO: 1216 - protein, 14 aa, Homo sapiens
DKYSYAWSYDGFDI

SEQ ID NO: 1217 - protein, 123 aa, Homo sapiens
EVQLVESGGGVVRPGGSLRLSCAASGFTFDDYATSWVRQAPGKGLEWVSGITWNGGSTGYADSVKDRFTISRDNAKNSLYLQMNSLRAEDTALYYCVRDKYSYAWSYDGFDIWGQGTMVTVSS

SEQ ID NO: 1218 - protein, 5 aa, Homo sapiens
DYANS

SEQ ID NO: 1219 - protein, 17 aa, Homo sapiens
GITWNGGSTGYADSVKD

SEQ ID NO: 1220 - protein, 14 aa, Homo sapiens
DKYSYAWSYDGFDI

SEQ ID NO: 1221 - protein, 123 aa, Homo sapiens
EVQLVESGGGVVRPGGSLRLSCAASGFTFDDYANSWVRQAPGKGLEWVSGITWNGGSTGYADSVKDRFTISRDNAKNSLYLQMNSLRAEDTALYYCVRDKYSYAWSYDGFDIWGQGTMVTVSS

SEQ ID NO: 1222 - protein, 5 aa, Homo sapiens
DYADS

SEQ ID NO: 1223 - protein, 17 aa, Homo sapiens
GITWNGGSTGYADSVKD

SEQ ID NO: 1224 - protein, 14 aa, Homo sapiens
DKYSYAWSYDGFDI

SEQ ID NO: 1225 - protein, 123 aa, Homo sapiens
EVQLVESGGGVVRPGGSLRLSCAASGFTFDDYADSWVRQAPGKGLEWVSGITWNGGSTGYADSVKDRFTISRDNAKNSLYLQMNSLRAEDTALYYCVRDKYSYAWSYDGFDIWGQGTMVTVSS

SEQ ID NO: 1226 - protein, 5 aa, Homo sapiens
DYASS

SEQ ID NO: 1227 - protein, 17 aa, Homo sapiens
GITWNGGSTGYADSVKD

SEQ ID NO: 1228 - protein, 14 aa, Homo sapiens
DKYSYAWSYDGFDI

SEQ ID NO: 1229 - protein, 123 aa, Homo sapiens
EVQLVESGGGVVRPGGSLRLSCAASGFTFDDYASSWVRQAPGKGLEWVSGITWNGGSTGYADSVKDRFTISRDNAKNSLYLQMNSLRAEDTALYYCVRDKYSYAWSYDGFDIWGQGTMVTVSS

SEQ ID NO: 1230 - protein, 5 aa, Homo sapiens
DYALS

SEQ ID NO: 1231 - protein, 17 aa, Homo sapiens
GITWNGGSTGYADSVKD

SEQ ID NO: 1232 - protein, 14 aa, Homo sapiens
DKYSYAWSYDGFDI

SEQ ID NO: 1233 - protein, 123 aa, Homo sapiens
EVQLVESGGGVVRPGGSLRLSCAASGFTFDDYALSWVRQAPGKGLEWVSGITWNGGSTGYADSVKDRFTISRDNAKNSLYLQMNSLRAEDTALYYCVRDKYSYAWSYDGFDIWGQGTMVTVSS

SEQ ID NO: 1234 - protein, 5 aa, Homo sapiens
DYAGS

SEQ ID NO: 1235 - protein, 17 aa, Homo sapiens
GITWNGGSTGYADSVKD

SEQ ID NO: 1236 - protein, 14 aa, Homo sapiens
DKYSYAWSYDGFDI

SEQ ID NO: 1237 - protein, 123 aa, Homo sapiens
EVQLVESGGGVVRPGGSLRLSCAASGFTFDDYAGSWVRQAPGKGLEWVSGITWNGGSTGYADSVKDRFTISRDNAKNSLYLQMNSLRAEDTALYYCVRDKYSYAWSYDGFDIWGQGTMVTVSS

SEQ ID NO: 1238 - protein, 5 aa, Homo sapiens
DYAES

SEQ ID NO: 1239 - protein, 17 aa, Homo sapiens
GITWNGGSTGYADSVKD

SEQ ID NO: 1240 - protein, 14 aa, Homo sapiens
DKYSYAWSYDGFDI

SEQ ID NO: 1241 - protein, 123 aa, Homo sapiens
EVQLVESGGGVVRPGGSLRLSCAASGFTFDDYAESWVRQAPGKGLEWVSGITWNGGSTGYADSVKDRFTISRDNAKNSLYLQMNSLRAEDTALYYCVRDKYSYAWSYDGFDIWGQGTMVTVSS

SEQ ID NO: 1242 - protein, 5 aa, Homo sapiens
DYAWS

SEQ ID NO: 1243 - protein, 17 aa, Homo sapiens
GITWNGGSTGYADSVKD

SEQ ID NO: 1244 - protein, 14 aa, Homo sapiens
DKYSYAWSYDGFDI

SEQ ID NO: 1245 - protein, 123 aa, Homo sapiens
EVQLVESGGGVVRPGGSLRLSCAASGFTFDDYAWSWVRQAPGKGLEWVSGITWNGGSTGYADSVKDRFTISRDNAKNSLYLQMNSLRAEDTALYYCVRDKYSYAWSYDGFDIWGQGTMVTVSS

SEQ ID NO: 1246 - protein, 5 aa, Homo sapiens
DYARS

SEQ ID NO: 1247 - protein, 17 aa, Homo sapiens
GITWNGGSTGYADSVKD

SEQ ID NO: 1248 - protein, 14 aa, Homo sapiens
DKYSYAWSYDGFDI

SEQ ID NO: 1249 - protein, 123 aa, Homo sapiens
EVQLVESGGGVVRPGGSLRLSCAASGFTFDDYARSWVRQAPGKGLEWVSGITWNGGSTGYADSVKDRFTISRDNAKNSLYLQMNSLRAEDTALYYCVRDKYSYAWSYDGFDIWGQGTMVTVSS

SEQ ID NO: 1250 - protein, 5 aa, Homo sapiens
DYAFS

SEQ ID NO: 1251 - protein, 17 aa, Homo sapiens
GITWNGGSTGYADSVKD

SEQ ID NO: 1252 - protein, 14 aa, Homo sapiens
DKYSYAWSYDGFDI

SEQ ID NO: 1253 - protein, 123 aa, Homo sapiens
EVQLVESGGGVVRPGGSLRLSCAASGFTFDDYAFSWVRQAPGKGLEWVSGITWNGGSTGYADSVKDRFTISRDNAKNSLYLQMNSLRAEDTALYYCVRDKYSYAWSYDGFDIWGQGTMVTVSS

SEQ ID NO: 1254 - protein, 5 aa, Homo sapiens
DYAVS

SEQ ID NO: 1255 - protein, 17 aa, Homo sapiens
GITWNGGSTGYADSVKD

SEQ ID NO: 1256 - protein, 14 aa, Homo sapiens
DKYSYAWSYDGFDI

SEQ ID NO: 1257 - protein, 123 aa, Homo sapiens
EVQLVESGGGVVRPGGSLRLSCAASGFTFDDYAVSWVRQAPGKGLEWVSGITWNGGSTGYADSVKDRFTISRDNAKNSLYLQMNSLRAEDTALYYCVRDKYSYAWSYDGFDIWGQGTMVTVSS

SEQ ID NO: 1258 - protein, 5 aa, Homo sapiens
DYAMS

SEQ ID NO: 1259 - protein, 17 aa, Homo sapiens
GITWTGGSTGYADSVKD

SEQ ID NO: 1260 - protein, 14 aa, Homo sapiens
DKYSYAWSYDGFDI

SEQ ID NO: 1261 - protein, 123 aa, Homo sapiens
EVQLVESGGGVVRPGGSLRLSCAASGFTFDDYAMSWVRQAPGKGLEWVSGITWTGGSTGYADSVKDRFTISRDNAKNSLYLQMNSLRAEDTALYYCVRDKYSYAWSYDGFDIWGQGTMVTVSS

SEQ ID NO: 1262 - protein, 5 aa, Homo sapiens
DYAMS

SEQ ID NO: 1263 - protein, 17 aa, Homo sapiens
GITWSGGSTGYADSVKD

SEQ ID NO: 1264 - protein, 14 aa, Homo sapiens
DKYSYAWSYDGFDI

SEQ ID NO: 1265 - protein, 123 aa, Homo sapiens
EVQLVESGGGVVRPGGSLRLSCAASGFTFDDYAMSWVRQAPGKGLEWVSGITWSGGSTGYADSVKDRFTISRDNAKNSLYLQMNSLRAEDTALYYCVRDKYSYAWSYDGFDIWGQGTMVTVSS

SEQ ID NO: 1266 - protein, 5 aa, Homo sapiens
DYAMS

SEQ ID NO: 1267 - protein, 17 aa, Homo sapiens
GITWPGGSTGYADSVKD

SEQ ID NO: 1268 - protein, 14 aa, Homo sapiens
DKYSYAWSYDGFDI

SEQ ID NO: 1269 - protein, 123 aa, Homo sapiens
EVQLVESGGGVVRPGGSLRLSCAASGFTFDDYAMSWVRQAPGKGLEWVSGITWPGGSTGYADSVKDRFTISRDNAKNSLYLQMNSLRAEDTALYYCVRDKYSYAWSYDGFDIWGQGTMVTVSS

SEQ ID NO: 1270 - protein, 5 aa, Homo sapiens
DYAMS

SEQ ID NO: 1271 - protein, 17 aa, Homo sapiens
GITWIGGSTGYADSVKD

SEQ ID NO: 1272 - protein, 14 aa, Homo sapiens
DKYSYAWSYDGFDI

SEQ ID NO: 1273 - protein, 123 aa, Homo sapiens
EVQLVESGGGVVRPGGSLRLSCAASGFTFDDYAMSWVRQAPGKGLEWVSGITWIGGSTGYADSVKDRFTISRDNAKNSLYLQMNSLRAEDTALYYCVRDKYSYAWSYDGFDIWGQGTMVTVSS

SEQ ID NO: 1274 - protein, 5 aa, Homo sapiens
DYAMS

SEQ ID NO: 1275 - protein, 17 aa, Homo sapiens
GITWLGGSTGYADSVKD

SEQ ID NO: 1276 - protein, 14 aa, Homo sapiens
DKYSYAWSYDGFDI

SEQ ID NO: 1277 - protein, 123 aa, Homo sapiens
EVQLVESGGGVVRPGGSLRLSCAASGFTFDDYAMSWVRQAPGKGLEWVSGITWLGGSTGYADSVKDRFTISRDNAKNSLYLQMNSLRAEDTALYYCVRDKYSYAWSYDGFDIWGQGTMVTVSS

SEQ ID NO: 1278 - protein, 5 aa, Homo sapiens
DYAMS

SEQ ID NO: 1279 - protein, 17 aa, Homo sapiens
GITWNGGSTGYADSVKG

SEQ ID NO: 1280 - protein, 14 aa, Homo sapiens
DKYSYAWSYDGFDI

SEQ ID NO: 1281 - protein, 123 aa, Homo sapiens
EVQLVESGGGVVRPGGSLRLSCAASGFTFDDYAMSWVRQAPGKGLEWVSGITWNGGSTGYADSVKGRFTISRDNAKNSLYLQMNSLRAEDTALYYCVRDKYSYAWSYDGFDIWGQGTMVTVSS

SEQ ID NO: 1282 - protein, 5 aa, Homo sapiens
DYAMS

SEQ ID NO: 1283 - protein, 17 aa, Homo sapiens
GITWKGGSTGYADSVKD

SEQ ID NO: 1284 - protein, 14 aa, Homo sapiens
DKYSYAWSYDGFDI

SEQ ID NO: 1285 - protein, 123 aa, Homo sapiens
EVQLVESGGGVVRPGGSLRLSCAASGFTFDDYAMSWVRQAPGKGLEWVSGITWKGGSTGYADSVKDRFTISRDNAKNSLYLQMNSLRAEDTALYYCVRDKYSYAWSYDGFDIWGQGTMVTVSS

SEQ ID NO: 1286 - protein, 5 aa, Homo sapiens
DYAMS

SEQ ID NO: 1287 - protein, 17 aa, Homo sapiens
GITWRGGSTGYADSVKD

SEQ ID NO: 1288 - protein, 14 aa, Homo sapiens
DKYSYAWSYDGFDI

SEQ ID NO: 1289 - protein, 123 aa, Homo sapiens
EVQLVESGGGVVRPGGSLRLSCAASGFTFDDYAMSWVRQAPGKGLEWVSGITWRGGSTGYADSVKDRFTISRDNAKNSLYLQMNSLRAEDTALYYCVRDKYSYAWSYDGFDIWGQGTMVTVSS

SEQ ID NO: 1290 - protein, 5 aa, Homo sapiens
DYAMS

SEQ ID NO: 1291 - protein, 17 aa, Homo sapiens
GITWNGGSTGYADSVKD

SEQ ID NO: 1292 - protein, 14 aa, Homo sapiens
DKYSYAWSYDVFDI

SEQ ID NO: 1293 - protein, 123 aa, Homo sapiens
EVQLVESGGGVVRPGGSLRLSCAASGFTFDDYAMSWVRQAPGKGLEWVSGITWNGGSTGYADSVKDRFTISRDNAKNSLYLQMNSLRAEDTALYYCVRDKYSYAWSYDVFDIWGQGTMVTVSS

SEQ ID NO: 1294 - protein, 5 aa, Homo sapiens
DYAMS

SEQ ID NO: 1295 - protein, 17 aa, Homo sapiens
GITWNGGSTGYADSVKD

SEQ ID NO: 1296 - protein, 14 aa, Homo sapiens
DKYSYAWSYDDFDI

SEQ ID NO: 1297 - protein, 123 aa, Homo sapiens
EVQLVESGGGVVRPGGSLRLSCAASGFTFDDYAMSWVRQAPGKGLEWVSGITWNGGSTGYADSVKDRFTISRDNAKNSLYLQMNSLRAEDTALYYCVRDKYSYAWSYDDFDIWGQGTMVTVSS

SEQ ID NO: 1298 - protein, 5 aa, Homo sapiens
DYTMT

SEQ ID NO: 1299 - protein, 17 aa, Homo sapiens
YISTGGTIKYYTDSVKG

SEQ ID NO: 1300 - protein, 16 aa, Homo sapiens
EAPLRLGESPHDAFDI

SEQ ID NO: 1301 - protein, 125 aa, Homo sapiens
QVQLVESGGGLVKPGGSLRLSCAASGFTFSDYTMTWMRQAPGKGLEWVSYISTGGTIKYYTDSVKGRFTISRDNAKNSLYLQMNSLRADDTAVYYCAREAPLRLGESPHDAFDIWGQGTMVTVSS

SEQ ID NO: 1302 - protein, 5 aa, Homo sapiens
DYTMT

SEQ ID NO: 1303 - protein, 17 aa, Homo sapiens
YISTGGSIKYYTDSVKG

SEQ ID NO: 1304 - protein, 16 aa, Homo sapiens
EAPLRLGESPHDAFDI

SEQ ID NO: 1305 - protein, 125 aa, Homo sapiens
EVQLLESGGGLVKPGGSLRLSCAASGFTFSDYTMTWMRQAPGKGLEWVSYISTGGSIKYYTDSVKGRFTISRDNAKNSLYLQMNSLRADDTAVYYCAREAPLRLGESPHDAFDIWGQGTMVTVSS

SEQ ID NO: 1306 - protein, 5 aa, Homo sapiens
DYTMT

SEQ ID NO: 1307 - protein, 17 aa, Homo sapiens
YISTGGSIKYYTDSVKG

SEQ ID NO: 1308 - protein, 16 aa, Homo sapiens
EAPLRLGESPHDAFDI

SEQ ID NO: 1309 - protein, 125 aa, Homo sapiens
QVQLVESGGGLVKPGGSLRLSCAASGFTFSDYTMTWMRQAPGKGLEWVSYISTGGSIKYYTDSVKGRFTISRDNAKNSLYLQMNSLRADDTAVYYCAREAPLRLGESPHDAFDIWGQGTMVTVSS

SEQ ID NO: 1310 - protein, 5 aa, Homo sapiens
DYYMI

SEQ ID NO: 1311 - protein, 17 aa, Homo sapiens
YISGGGTTKYYTDSVKG

SEQ ID NO: 1312 - protein, 16 aa, Homo sapiens
EAPLRLGETPHDAFDI

SEQ ID NO: 1313 - protein, 125 aa, Homo sapiens
QVQLVESGGGLVKPGGSLRLSCAASGFTFSDYYMIWMRQAPGKGLEWVSYISGGGTTKYYTDSVKGRFTISRDNAKNSLYLQMNSLRADDTAVYYCAREAPLRLGETPHDAFDIWGQGTMVTVSS

SEQ ID NO: 1314 - protein, 5 aa, Homo sapiens
DYTMT

SEQ ID NO: 1315 - protein, 17 aa, Homo sapiens
YISTGGNTKYYTDSVKG

SEQ ID NO: 1316 - protein, 16 aa, Homo sapiens
EAPLRLGESPHDAFDI

SEQ ID NO: 1317 - protein, 125 aa, Homo sapiens
EVQLVESGGGLVKPGGSLRLSCAASGFTFSDYTMTWMRQAPGKGLEWVSYISTGGNTKYYTDSVKGRFTISRDNAKNSLYLQMNSLRADDTAVYYCAREAPLRLGESPHDAFDIWGQGTMVTVSS

SEQ ID NO: 1318 - protein, 5 aa, Homo sapiens
DYTMT

SEQ ID NO: 1319 - protein, 17 aa, Homo sapiens
YISTGGTIKYYTDSVKG

SEQ ID NO: 1320 - protein, 16 aa, Homo sapiens
EAPLRLGESPHDAFDI

SEQ ID NO: 1321 - protein, 125 aa, Homo sapiens
EVQLLESGGGLVKPGGSLRLSCAASGFTFSDYTMTWMRQAPGKGLEWVSYISTGGTIKYYTDSVKGRFTISRDNAKNSLYLQMSSLRADDTAVYYCAREAPLRLGESPHDAFDIWGQGTMVTVSS

SEQ ID NO: 1322 - protein, 5 aa, Homo sapiens
DYTMT

SEQ ID NO: 1323 - protein, 17 aa, Homo sapiens
YISTGGTIKYYTDSVKG

SEQ ID NO: 1324 - protein, 16 aa, Homo sapiens
EAPLRLGESPHDAFDI

SEQ ID NO: 1325 - protein, 125 aa, Homo sapiens
EVQLVESGGGLVKPGGSLRLSCAASGFTFSDYTMTWMRQAPGKGLEWVSYISTGGTIKYYTDSVKGRFTISRDNAKNSLYLQMNSLRADDTAVYYCAREAPLRLGESPHDAFDIWGQGTMVTVSS

SEQ ID NO: 1326 - protein, 5 aa, Homo sapiens
DYTMT

SEQ ID NO: 1327 - protein, 17 aa, Homo sapiens
YISTGGSIKYYTDSVKG

SEQ ID NO: 1328 - protein, 16 aa, Homo sapiens
EAPLRLGESPHDAFDI

SEQ ID NO: 1329 - protein, 125 aa, Homo sapiens
EVQLVESGGGLVKPGGSLRLSCAASGFTFSDYTMTWMRQAPGKGLEWVSYISTGGSIKYYTDSVKGRFTISRDNAKNSLYLQMNSLRAGDTAVYYCAREAPLRLGESPHDAFDIWGQGTMVTVSS

SEQ ID NO: 1330 - protein, 5 aa, Homo sapiens
DYTMT

SEQ ID NO: 1331 - protein, 17 aa, Homo sapiens
YISTGGTIKYYTDSVKG

SEQ ID NO: 1332 - protein, 16 aa, Homo sapiens
EAPLRLGESPHDAFDI

SEQ ID NO: 1333 - protein, 125 aa, Homo sapiens
QVQLVESGGGLVKPGGSLRLSCAASGFTFGDYTMTWMRQAPGKGLEWVSYISTGGTIKYYTDSVKGRFTISRDNAKNSLYLQMDSLRADDTAVYYCAREAPLRLGESPHDAFDIWGQGTMVTVSS

SEQ ID NO: 1334 - protein, 5 aa, Homo sapiens
DYTMS

SEQ ID NO: 1335 - protein, 17 aa, Homo sapiens
YISLGGNTKYYTDSVKG

SEQ ID NO: 1336 - protein, 16 aa, Homo sapiens
EAPLRLGESPHDAFDI

SEQ ID NO: 1337 - protein, 125 aa, Homo sapiens
QVQLVESGGGLVKPGGSLRLSCAASGFTFSDYTMSWMRQAPGKGLEWISYISLGGNTKYYTDSVKGRFTISRDNAKNSLYLQMNSLRADDTAVYYCAREAPLRLGESPHDAFDIWGQGTMVTVSS

SEQ ID NO: 1338 - protein, 5 aa, Homo sapiens
DYDMT

SEQ ID NO: 1339 - protein, 17 aa, Homo sapiens
YISRGGSTKYYADSVKG

SEQ ID NO: 1340 - protein, 16 aa, Homo sapiens
EAPLRLGETPHDAFDI

SEQ ID NO: 1341 - protein, 125 aa, Homo sapiens
EVQLLESGGGLVKPGGSLRLSCAASGFTFSDYDMTWIRQAPGKGQEWVSYISRGGSTKYYADSVKGRFTISRDNAKNSLYLQMNSLRAEDTAVYYCAREAPLRLGETPHDAFDIWGQGTMVTVSS

SEQ ID NO: 1342 - protein, 5 aa, Homo sapiens
DYYMG

SEQ ID NO: 1343 - protein, 17 aa, Homo sapiens
YISSSGSTIYYADSVKG

SEQ ID NO: 1344 - protein, 16 aa, Homo sapiens
EAPLRLGESPHDAFDI

SEQ ID NO: 1345 - protein, 125 aa, Homo sapiens
EVQLLESGGGVVKPGGSLRLSCAASGFTFSDYYMGWIRQAPGKGLEWISYISSSGSTIYYADSVKGRFTISRDNAKNSLYLQMNSLRAEDTAVYYCAREAPLRLGESPHDAFDIWGQGTMVTVSS

SEQ ID NO: 1346 - protein, 5 aa, Homo sapiens
DYTMT

SEQ ID NO: 1347 - protein, 17 aa, Homo sapiens
YISTGGTIKYYTDSVKG

SEQ ID NO: 1348 - protein, 16 aa, Homo sapiens
EAPLRLGESPHDAFDI

SEQ ID NO: 1349 - protein, 125 aa, Homo sapiens
EVQLLESGGGLVKPGGSLRLSCAASGFTFSDYTMTWMRQAPGKGLEWVSYISTGGTIKYYTDSVKGRFTISRDNAKNSLYLQMNSLRADDTAVYYCAREAPLRLGESPHDAFDIWGQGTMVTVSS

SEQ ID NO: 1350 - protein, 5 aa, Homo sapiens
DYTMT

SEQ ID NO: 1351 - protein, 17 aa, Homo sapiens
YISTGGTIKYYTDSVKG

SEQ ID NO: 1352 - protein, 16 aa, Homo sapiens
EAPLRLGESPHDAFDI

SEQ ID NO: 1353 - protein, 125 aa, Homo sapiens
EVQLVESGGGLVQPGRSLRLSCAASGFTFSDYTMTWMRQAPGKGLEWVSYISTGGTIKYYTDSVKGRFTISRDNAKNSLYLQMNSLRADDTAVYYCAREAPLRLGESPHDAFDIWGQGTMVTVSS

SEQ ID NO: 1354 - protein, 5 aa, Homo sapiens
DNSMS

SEQ ID NO: 1355 - protein, 17 aa, Homo sapiens
YISSSGSTIYYADSVKG

SEQ ID NO: 1356 - protein, 16 aa, Homo sapiens
EAPLRLGESPHDAFDI

SEQ ID NO: 1357 - protein, 125 aa, Homo sapiens
QVQLVESGGGLVKPGGSLRLSCAASGFTFSDNSMSWIRQAPGKGLEWVSYISSSGSTIYYADSVKGRFTISRDNAKNSLYLQMNTLRAEDTAVYYCAKEAPLRLGESPHDAFDIWGQGTMVTVSS

SEQ ID NO: 1358 - protein, 5 aa, Homo sapiens
DYTMS

SEQ ID NO: 1359 - protein, 17 aa, Homo sapiens
YISTGGSIKYYTDSVKG

SEQ ID NO: 1360 - protein, 16 aa, Homo sapiens
EAPLRLGESPHDAFDI

SEQ ID NO: 1361 - protein, 125 aa, Homo sapiens
EVQLVESGGGLVKPGGSLRLSCAASGFTFSDYTMSWMRQAPGKGLEWVSYISTGGSIKYYTDSVKGRFTISRDNAKNSLYLQMNSLRADDTAVYYCAREAPLRLGESPHDAFDIWGQGTMVTVSS

SEQ ID NO: 1362 - protein, 5 aa, Homo sapiens
DYTMT

SEQ ID NO: 1363 - protein, 17 aa, Homo sapiens
YISTGGSIKYYTDSVKG

SEQ ID NO: 1364 - protein, 16 aa, Homo sapiens
EAPLRLGESPHDAFDI

SEQ ID NO: 1365 - protein, 125 aa, Homo sapiens
EVQLVESGGGLVKPGGSLRLSCAASGFTFSDYTMTWMRQAPGKGLEWVSYISTGGSIKYYTDSVKGRFTISRDNAKNSLYLQMNSLRVDDTAVYYCAREAPLRLGESPHDAFDIWGQGTMVTVSS

SEQ ID NO: 1366 - protein, 5 aa, Homo sapiens
DYTMT

SEQ ID NO: 1367 - protein, 17 aa, Homo sapiens
YISTGGTIKYYTDSVKG

SEQ ID NO: 1368 - protein, 16 aa, Homo sapiens
EAPLRLGESPHDAFDI

SEQ ID NO: 1369 - protein, 125 aa, Homo sapiens
QVQLLESGGGLVKPGGSLRLSCAASGFTFSDYTMTWMRQAPGKGLEWVSYISTGGTIKYYTDSVKGRFTISRDNAKNSLYLQMNSLRADDTAVYYCAREAPLRLGESPHDAFDIWGQGTMVTVSS

SEQ ID NO: 1370 - protein, 5 aa, Homo sapiens
DYTMT

SEQ ID NO: 1371 - protein, 17 aa, Homo sapiens
YISTGGSIKYYTDSVKG

SEQ ID NO: 1372 - protein, 16 aa, Homo sapiens
EAPLRLGETPHDAFDI

SEQ ID NO: 1373 - protein, 125 aa, Homo sapiens
QVQLVESGGGLVKPGGSLRLSCAASGFTFSDYTMTWMRQAPGKGLEWVSYISTGGSIKYYTDSVKGRFTISRDNAKNSLYLQMNSLRAEDTAVYYCAREAPLRLGETPHDAFDIWGQGTMVTVSS

SEQ ID NO: 1374 - protein, 5 aa, Homo sapiens
DYTMT

SEQ ID NO: 1375 - protein, 17 aa, Homo sapiens
YISSGGSIKFYADSVKG

SEQ ID NO: 1376 - protein, 16 aa, Homo sapiens
EAPLRLGESPHDAFDI

SEQ ID NO: 1377 - protein, 125 aa, Homo sapiens
EVQLLESGGGLVKPGGSLRLSCAASGFTFSDYTMTWMRQAPGKGLEWVSYISSGGSIKFYADSVKGRFTISRDNAKNSLYLQMNSLRAEDTAVYYCAREAPLRLGESPHDAFDIWGQGTMVTVSS

SEQ ID NO: 1378 - protein, 5 aa, Homo sapiens
DYTMT

SEQ ID NO: 1379 - protein, 17 aa, Homo sapiens
YISTGGSIKYYTDSVKG

SEQ ID NO: 1380 - protein, 16 aa, Homo sapiens
EAPLRLGESPHDAFDT

SEQ ID NO: 1381 - protein, 125 aa, Homo sapiens
EVQLVESGGGLVKPGGSLRLSCAASGFTFSDYTMTWMRQAPGKGLEWVSYISTGGSIKYYTDSVKGRFTISRDNAKNSLYLQMNSLRADDTAVYYCAREAPLRLGESPHDAFDTWGQGTMVTVSS

SEQ ID NO: 1382 - protein, 5 aa, Homo sapiens
DYTMT

SEQ ID NO: 1383 - protein, 17 aa, Homo sapiens
YISTGGSIKYYTDSVKG

SEQ ID NO: 1384 - protein, 16 aa, Homo sapiens
EAPLRLGESPHDAFDI

SEQ ID NO: 1385 - protein, 125 aa, Homo sapiens
EVQLVESGGGLVKPGGSLRLSCAASGFTFSDYTMTWMRQAPGKGLEWVSYISTGGSIKYYTDSVKGRFTISRDNAKNSLYLQMNSLRADDTAVYYCAREAPLRLGESPHDAFDIWGQGTMVTVSS

SEQ ID NO: 1386 - protein, 5 aa, Homo sapiens
DYTMS

SEQ ID NO: 1387 - protein, 17 aa, Homo sapiens
YISTGGTIKYYTDSVKG

SEQ ID NO: 1388 - protein, 16 aa, Homo sapiens
EAPLRLGESPHDAFDI

SEQ ID NO: 1389 - protein, 125 aa, Homo sapiens
QITLKESGGGLVKPGGSLRLSCAASGFTFSDYTMSWMRQAPGKGLEWVSYISTGGTIKYYTDSVKGRFTISRDNAKNSLYLQMNSLRADDTAVYYCAREAPLRLGESPHDAFDIWGQGTMVTVSS

SEQ ID NO: 1390 - protein, 5 aa, Homo sapiens
DYDMY

SEQ ID NO: 1391 - protein, 17 aa, Homo sapiens
YISRGGSVTYYADSVKG

SEQ ID NO: 1392 - protein, 16 aa, Homo sapiens
EAPLRLGETPHAAFDI

SEQ ID NO: 1393 - protein, 125 aa, Homo sapiens
QVTLKESGGGLVKPGGSLRLSCAASGFTFSDYDMYWIRQAPGKGLEWVSYISRGGSVTYYADSVKGRFTISRDNAKNALYLQMNSLRAEDMAVYFCATEAPLRLGETPHAAFDIWGQGTMVTVSS

SEQ ID NO: 1394 - protein, 5 aa, Homo sapiens
DYYMS

SEQ ID NO: 1395 - protein, 17 aa, Homo sapiens
FISSSGSTTYYADSVKG

SEQ ID NO: 1396 - protein, 16 aa, Homo sapiens
EAPLRLGESPHDAFDF

SEQ ID NO: 1397 - protein, 125 aa, Homo sapiens
QVTLKESGGGLVKPGGSLRLSCAASGFTFSDYYMSWFRQAPGKEREWISFISSSGSTTYYADSVKGRFTISRDNAKNSLYLQMNSLRAEDTAVYYCAREAPLRLGESPHDAFDFWGQGTMVTVSS

SEQ ID NO: 1398 - protein, 5 aa, Homo sapiens
DNSMS

SEQ ID NO: 1399 - protein, 17 aa, Homo sapiens
YISSSGSTIYYADSVKG

SEQ ID NO: 1400 - protein, 16 aa, Homo sapiens
EAPLRLGESPHDAFDI

SEQ ID NO: 1401 - protein, 125 aa, Homo sapiens
QVTLKESGGGLVKPGGSLRLSCAASGFTFSDNSMSWIRQAPGKGLEWVSYISSSGSTIYYADSVKGRFTISRDNAKNSLYLQMNTLRAEDTAVYYCAKEAPLRLGESPHDAFDIWGQGTMVTVSS

SEQ ID NO: 1402 - protein, 5 aa, Homo sapiens
DYTMT

SEQ ID NO: 1403 - protein, 17 aa, Homo sapiens
YISTGGSIKYYTDSVKG

SEQ ID NO: 1404 - protein, 16 aa, Homo sapiens
EAPLRLGESPHDAFDI

SEQ ID NO: 1405 - protein, 125 aa, Homo sapiens
QVTLKESGGGLVKPGGSLRLSCAASGFTFSDYTMTWMRQAPGKGLEWVSYISTGGSIKYYTDSVKGRFTISRDNAKNSLYLQMNSLRADDTAVYYCAREAPLRLGESPHDAFDIWGQGTMVTVSS

SEQ ID NO: 1406 - protein, 5 aa, Homo sapiens
DYDMY

SEQ ID NO: 1407 - protein, 17 aa, Homo sapiens
YISRGGSVTYYADSVKG

SEQ ID NO: 1408 - protein, 16 aa, Homo sapiens
EAPLRLGETPHAAFDI

SEQ ID NO: 1409 - protein, 125 aa, Homo sapiens
QITLKESGGGLVKPGGSLRLSCAASGFTFSDYDMYWIRQAPGKGLEWVSYISRGGSVTYYADSVKGRFTISRDNAKNALYLQMNSLRAEDMAVYFCATEAPLRLGETPHAAFDIWGQGTMVTVSS

SEQ ID NO: 1410 - protein, 5 aa, Homo sapiens
DYTMS

SEQ ID NO: 1411 - protein, 17 aa, Homo sapiens
YISTGGTIKYYTDSVKG

SEQ ID NO: 1412 - protein, 16 aa, Homo sapiens
EAPLRLGESPHDAFDI

SEQ ID NO: 1413 - protein, 125 aa, Homo sapiens
QVTLKESGGGLVKPGGSLRLSCAASGFTFSDYTMSWMRQAPGKGLEWVSYISTGGTIKYYTDSVKGRFTISRDNAKNSLYLQMNSLRADDTAVYYCAREAPLRLGESPHDAFDIWGQGTMVTVSS

SEQ ID NO: 1414 - protein, 5 aa, Homo sapiens
DYTMT

SEQ ID NO: 1415 - protein, 17 aa, Homo sapiens
YISTGGSIKYYTDSVKG

SEQ ID NO: 1416 - protein, 16 aa, Homo sapiens
EAPLRLGESPHDAFDI

SEQ ID NO: 1417 - protein, 125 aa, Homo sapiens
QVTLKESGGGLVKPGGSLRLSCAASGFTFSDYTMTWMRQAPGKGLEWVSYISTGGSIKYYTDSVKGRFTISRDNARNSLYLQMNSLRAEDTAVYYCAREAPLRLGESPHDAFDIWGQGTMVTVSS

SEQ ID NO: 1418 - protein, 5 aa, Homo sapiens
DYTMT

SEQ ID NO: 1419 - protein, 17 aa, Homo sapiens
YISTGGSTKYYTDSVKG

SEQ ID NO: 1420 - protein, 16 aa, Homo sapiens
EAPLRLGESPHDAFDI

SEQ ID NO: 1421 - protein, 125 aa, Homo sapiens
QVTLKESGGGLVKPGGSLRLSCAASGFTFSDYTMTWMRQAPGKGLEWVSYISTGGSTKYYTDSVKGRFTISRDNAKNSLYLQMNSLRADDTAVYYCAREAPLRLGESPHDAFDIWGQGTMVTVSS

SEQ ID NO: 1422 - protein, 5 aa, Homo sapiens
DDYMM

SEQ ID NO: 1423 - protein, 17 aa, Homo sapiens
YISSGGSIIYYADSVKG

SEQ ID NO: 1424 - protein, 16 aa, Homo sapiens
EAPLRLGESPHDAFDI

SEQ ID NO: 1425 - protein, 125 aa, Homo sapiens
QVTLKESGGGLVKPGGSLRLSCAASGFTFSDDYMMWIRQAPGKGLEWVSYISSGGSIIYYADSVKGRFTISRDNAKNSLYLQMNSLRAEDTAVYYCAREAPLRLGESPHDAFDIRGQGTMVTVSS

SEQ ID NO: 1426 - protein, 5 aa, Homo sapiens
DYDMY

SEQ ID NO: 1427 - protein, 17 aa, Homo sapiens
YISRGGSVTYYADSVKG

SEQ ID NO: 1428 - protein, 16 aa, Homo sapiens
EAPLRLGETPHAAFDI

SEQ ID NO: 1429 - protein, 125 aa, Homo sapiens
QITLKESGGGLVKPGGSLRLSCAASGFTFSDYDMYWVRQAPGKGLEWVSYISRGGSVTYYADSVKGRFTISRDNAKNALYLQMNSLRAEDMAVYFCATEAPLRLGETPHAAFDIWGQGTMVTVSS

SEQ ID NO: 1430 - protein, 5 aa, Homo sapiens
DYTMT

SEQ ID NO: 1431 - protein, 17 aa, Homo sapiens
YISTGGSVKYYTDSVKG

SEQ ID NO: 1432 - protein, 16 aa, Homo sapiens
EAPLRLGESPHDAFDI

SEQ ID NO: 1433 - protein, 125 aa, Homo sapiens
EVQLVESGGGLVKPGGSLRLSCAASGFTFSDYTMTWMRQAPGKGLEWVSYISTGGSVKYYTDSVKGRFTISRDNAKNSLYLQMNSLRADDTAVYYCAREAPLRLGESPHDAFDIWGQGTMVTVSS

SEQ ID NO: 1434 - protein, 5 aa, Homo sapiens
DYTMT

SEQ ID NO: 1435 - protein, 17 aa, Homo sapiens
YISTGGSIKYYTDSVKG

SEQ ID NO: 1436 - protein, 16 aa, Homo sapiens
EAPLRLGESPHDAFDI

SEQ ID NO: 1437 - protein, 125 aa, Homo sapiens
EVQLLESGGGLVKPGGSLRLSCAASGFTFSDYTMTWMRQAPGKGLEWVSYISTGGSIKYYTDSVKGRFTISRDNAKNSLYLQMNSLRVDDTAVYYCAREAPLRLGESPHDAFDIWGQGTMVTVSS

SEQ ID NO: 1438 - protein, 5 aa, Homo sapiens
DYTMT

SEQ ID NO: 1439 - protein, 17 aa, Homo sapiens
YISTGGTIKYYTDSVKG

SEQ ID NO: 1440 - protein, 16 aa, Homo sapiens
EAPLRLGESPHDAFDI

SEQ ID NO: 1441 - protein, 125 aa, Homo sapiens
EVQLVESGGGLVKPGGSLRLSCAASGFTFSDYTMTWMRQAPGKGLEWVSYISTGGTIKYYTDSVKGRFTISRDNAKNSLFLQMNSLRADDTAVYYCAREAPLRLGESPHDAFDIWGQGTMVTVSS

SEQ ID NO: 1442 - protein, 5 aa, Homo sapiens
DYTMT

SEQ ID NO: 1443 - protein, 17 aa, Homo sapiens
YISTGGSIKYYTDSVKG

SEQ ID NO: 1444 - protein, 16 aa, Homo sapiens
EAPLRLGESPHDAFDI

SEQ ID NO: 1445 - protein, 125 aa, Homo sapiens
QVQLVESGGGLVKPGGSLRLSCAASGFTFSDYTMTWMRQAPGKGLEWVSYISTGGSIKYYTDSVKGRFTISRDNAKNSLFLQMNSLRADDTAVYYCAREAPLRLGESPHDAFDIWGQGTMVTVSS

SEQ ID NO: 1446 - protein, 5 aa, Homo sapiens
DYTMT

SEQ ID NO: 1447 - protein, 17 aa, Homo sapiens
YISTGGTIKYYTDSVKG

SEQ ID NO: 1448 - protein, 16 aa, Homo sapiens
EAPLRLGESPHDAFDI

SEQ ID NO: 1449 - protein, 125 aa, Homo sapiens
EVQLVESGGGLVQPGGSLRLSCAASGFTFSDYTMTWMRQAPGKGLEWVSYISTGGTIKYYTDSVKGRFTISRDNAKNSLYLQMNSLRADDTAVYYCAREAPLRLGESPHDAFDIWGQGTMVTVSS

SEQ ID NO: 1450 - protein, 5 aa, Homo sapiens
DYTMT

SEQ ID NO: 1451 - protein, 17 aa, Homo sapiens
YISTGGSIKYYTDSVKG

SEQ ID NO: 1452 - protein, 16 aa, Homo sapiens
EAPLRLGESPHDAFDI

SEQ ID NO: 1453 - protein, 125 aa, Homo sapiens
QVQLQESGGGLVKPGGSLRLSCAASGFTFSDYTMTWMRQAPGKGLEWVSYISTGGSIKYYTDSVKGRFTISRDNAKNSLYLQMNSLRADDTAVYYCAREAPLRLGESPHDAFDIWGQGTMVTVSS

SEQ ID NO: 1454 - protein, 5 aa, Homo sapiens
DSSMS

SEQ ID NO: 1455 - protein, 17 aa, Homo sapiens
YISSGGGIIYYTDSVKG

SEQ ID NO: 1456 - protein, 16 aa, Homo sapiens
EAPLRLGESPHDAFDI

SEQ ID NO: 1457 - protein, 125 aa, Homo sapiens
EVQLVESGGGLVKPGGSLRLSCAASGFTFSDSSMSWIRQAPGRGLEWISYISSGGGIIYYTDSVKGRFTISRDNAKNSLYLQMNSLRVEDTAVYYCAKEAPLRLGESPHDAFDIWGHGTMVTVSS

SEQ ID NO: 1458 - protein, 5 aa, Homo sapiens
DNSMT

SEQ ID NO: 1459 - protein, 17 aa, Homo sapiens
YISSGGGVIFYADSVKG

SEQ ID NO: 1460 - protein, 16 aa, Homo sapiens
EAPLRLGESPHDAFDI

SEQ ID NO: 1461 - protein, 125 aa, Homo sapiens
QVQLVESGGGLVKPGGSLRLSCAASGFTFSDNSMTWMRQAPGKGLEWVSYISSGGGVIFYADSVKGRFTISRDNAKNSLYLQMNSLRADDTAVYYCAREAPLRLGESPHDAFDIWGQGTMVTVSS

SEQ ID NO: 1462 - protein, 5 aa, Homo sapiens
DNSMT

SEQ ID NO: 1463 - protein, 17 aa, Homo sapiens
YISSGGGVKFYADSVKG

SEQ ID NO: 1464 - protein, 16 aa, Homo sapiens
EAPLRLGESPHDAFDI

SEQ ID NO: 1465 - protein, 125 aa, Homo sapiens
QVQLVESGGGLVKPGGSLRLSCAASGFTFSDNSMTWMRQAPGKGLEWVSYISSGGGVKFYADSVKGRFTISRDNAKNSLYLQMNSLRADDTAVYYCAREAPLRLGESPHDAFDIWGQGTMVTVSS

SEQ ID NO: 1466 - protein, 5 aa, Homo sapiens
DSSMT

SEQ ID NO: 1467 - protein, 17 aa, Homo sapiens
YISSGGGVIFYADSVKG

SEQ ID NO: 1468 - protein, 16 aa, Homo sapiens
EAPLRLGESPHDAFDI

SEQ ID NO: 1469 - protein, 125 aa, Homo sapiens
QVQLVESGGGLVKPGGSLRLSCAASGFTFSDSSMTWMRQAPGKGLEWVSYISSGGGVIFYADSVKGRFTISRDNAKNSLYLQMNSLRADDTAVYYCAREAPLRLGESPHDAFDIWGQGTMVTVSS

SEQ ID NO: 1470 - protein, 5 aa, Homo sapiens
DNSMT

SEQ ID NO: 1471 - protein, 17 aa, Homo sapiens
YISSGGAVKFYADSVKG

SEQ ID NO: 1472 - protein, 16 aa, Homo sapiens
EAPLRLGESPHDAFDI

SEQ ID NO: 1473 - protein, 125 aa, Homo sapiens
QVQLVESGGGLVKPGGSLRLSCAASGFTFSDNSMTWMRQAPGKGLEWVSYISSGGAVKFYADSVKGRFTISRDNAKNSLYLQMNSLRADDTAVYYCAREAPLRLGESPHDAFDIWGQGTMVTVSS

SEQ ID NO: 1474 - protein, 5 aa, Homo sapiens
DYSMS

SEQ ID NO: 1475 - protein, 17 aa, Homo sapiens
YISSGGGVIFYADSVKG

SEQ ID NO: 1476 - protein, 16 aa, Homo sapiens
EAPLRLGESPHDAFDI

SEQ ID NO: 1477 - protein, 125 aa, Homo sapiens
QVQLVESGGGLVKPGGSLRLSCAASGFTFSDYSMSWMRQAPGKGLEWVSYISSGGGVIFYADSVKGRFTISRDNAKNSLYLQMNSLRADDTAVYYCAREAPLRLGESPHDAFDIWGQGTMVTVSS

SEQ ID NO: 1478 - protein, 5 aa, Homo sapiens
DSSMS

SEQ ID NO: 1479 - protein, 17 aa, Homo sapiens
YISSGGGVIFYADSVKG

SEQ ID NO: 1480 - protein, 16 aa, Homo sapiens
EAPLRLGESPHDAFDI

SEQ ID NO: 1481 - protein, 125 aa, Homo sapiens
QVQLVESGGGLVKPGGSLRLSCAASGFTFSDSSMSWMRQAPGKGLEWVSYISSGGGVIFYADSVKGRFTISRDNAKNSLYLQMNSLRADDTAVYYCAREAPLRLGESPHDAFDIWGQGTMVTVSS

SEQ ID NO: 1482 - protein, 5 aa, Homo sapiens
DNSMS

SEQ ID NO: 1483 - protein, 17 aa, Homo sapiens
YISSGGGVIFYADSVKG

SEQ ID NO: 1484 - protein, 16 aa, Homo sapiens
EAPLRLGESPHDAFDI

SEQ ID NO: 1485 - protein, 125 aa, Homo sapiens
QVQLVESGGGLVKPGGSLRLSCAASGFTFSDNSMSWMRQAPGKGLEWVSYISSGGGVIFYADSVKGRFTISRDNAKNSLYLQMNSLRADDTAVYYCAREAPLRLGESPHDAFDIWGQGTMVTVSS

SEQ ID NO: 1486 - protein, 5 aa, Homo sapiens
DSSMT

SEQ ID NO: 1487 - protein, 17 aa, Homo sapiens
YISSGGGVKFYADSVKG

SEQ ID NO: 1488 - protein, 16 aa, Homo sapiens
EAPLRLGESPHDAFDI

SEQ ID NO: 1489 - protein, 125 aa, Homo sapiens
QVQLVESGGGLVKPGGSLRLSCAASGFTFSDSSMTWMRQAPGKGLEWVSYISSGGGVKFYADSVKGRFTISRDNAKNSLYLQMNSLRADDTAVYYCAREAPLRLGESPHDAFDIWGQGTMVTVSS

SEQ ID NO: 1490 - protein, 5 aa, Homo sapiens
DSSMS

SEQ ID NO: 1491 - protein, 17 aa, Homo sapiens
YISTGGGVKFYADSVKG

SEQ ID NO: 1492 - protein, 16 aa, Homo sapiens
EAPLRLGESPHDAFDI

SEQ ID NO: 1493 - protein, 125 aa, Homo sapiens
QVQLVESGGGLVKPGGSLRLSCAASGFTFSDSSMSWMRQAPGKGLEWVSYISTGGGVKFYADSVKGRFTISRDNAKNSLYLQMNSLRADDTAVYYCAREAPLRLGESPHDAFDIWGQGTMVTVSS

SEQ ID NO: 1494 - protein, 5 aa, Homo sapiens
DNSMT

SEQ ID NO: 1495 - protein, 17 aa, Homo sapiens
YISSGGTIKFYADSVKG

SEQ ID NO: 1496 - protein, 16 aa, Homo sapiens
EAPLRLGESPHDAFDI

SEQ ID NO: 1497 - protein, 125 aa, Homo sapiens
QVQLVESGGGLVKPGGSLRLSCAASGFTFSDNSMTWMRQAPGKGLEWVSYISSGGTIKFYADSVKGRFTISRDNAKNSLYLQMNSLRADDTAVYYCAREAPLRLGESPHDAFDIWGQGTMVTVSS

SEQ ID NO: 1498 - protein, 5 aa, Homo sapiens
DSSMT

SEQ ID NO: 1499 - protein, 17 aa, Homo sapiens
YISSGGAVKFYTDSVKG

SEQ ID NO: 1500 - protein, 16 aa, Homo sapiens
EAPLRLGESPHDAFDI

SEQ ID NO: 1501 - protein, 125 aa, Homo sapiens
QVQLVESGGGLVKPGGSLRLSCAASGFTFSDSSMTWMRQAPGKGLEWVSYISSGGAVKFYTDSVKGRFTISRDNAKNSLYLQMNSLRADDTAVYYCAREAPLRLGESPHDAFDIWGQGTMVTVSS

SEQ ID NO: 1502 - protein, 5 aa, Homo sapiens
DNSMT

SEQ ID NO: 1503 - protein, 17 aa, Homo sapiens
YISSGGGVKYYADSVKG

SEQ ID NO: 1504 - protein, 16 aa, Homo sapiens
EAPLRLGESPHDAFDI

SEQ ID NO: 1505 - protein, 125 aa, Homo sapiens
QVQLVESGGGLVKPGGSLRLSCAASGFTFSDNSMTWMRQAPGKGLEWVSYISSGGGVKYYADSVKGRFTISRDNAKNSLYLQMNSLRADDTAVYYCAREAPLRLGESPHDAFDIWGQGTMVTVSS

SEQ ID NO: 1506 - protein, 5 aa, Homo sapiens
DNSMT

SEQ ID NO: 1507 - protein, 17 aa, Homo sapiens
YISSGGSVKFYADSVKG

SEQ ID NO: 1508 - protein, 16 aa, Homo sapiens
EAPLRLGESPHDAFDI

SEQ ID NO: 1509 - protein, 125 aa, Homo sapiens
QVQLVESGGGLVKPGGSLRLSCAASGFTFSDNSMTWMRQAPGKGLEWVSYISSGGSVKFYADSVKGRFTISRDNAKNSLYLQMNSLRADDTAVYYCAREAPLRLGESPHDAFDIWGQGTMVTVSS

SEQ ID NO: 1510 - protein, 5 aa, Homo sapiens
DDSMT

SEQ ID NO: 1511 - protein, 17 aa, Homo sapiens
YISSGGGVIFYADSVKG

SEQ ID NO: 1512 - protein, 16 aa, Homo sapiens
EAPLRLGESPHDAFDI

SEQ ID NO: 1513 - protein, 125 aa, Homo sapiens
QVQLVESGGGLVKPGGSLRLSCAASGFTFSDDSMTWMRQAPGKGLEWVSYISSGGGVIFYADSVKGRFTISRDNAKNSLYLQMNSLRADDTAVYYCAREAPLRLGESPHDAFDIWGQGTMVTVSS

SEQ ID NO: 1514 - protein, 5 aa, Homo sapiens
DNSMT

SEQ ID NO: 1515 - protein, 17 aa, Homo sapiens
YISSGGGVKFYADSVKG

SEQ ID NO: 1516 - protein, 16 aa, Homo sapiens
EAPLRLGESPHDAFDI

SEQ ID NO: 1517 - protein, 125 aa, Homo sapiens
QVQLVESGGGLVKPGGSLRLSCAASGFTFSDNSMTWMRQAPGKGLEWVSYISSGGGVKFYADSVKGRFTISRDNAKNSLYLQMNSLRADDTAVYYCAREAPLRLGESPHDAFDISGQGTMVTVSS

SEQ ID NO: 1518 - protein, 5 aa, Homo sapiens
DNSMT

SEQ ID NO: 1519 - protein, 17 aa, Homo sapiens
YISSGGAVKFYADSVKG

SEQ ID NO: 1520 - protein, 16 aa, Homo sapiens
EAPLRLGESPHDAFDI

SEQ ID NO: 1521 - protein, 125 aa, Homo sapiens
QVQLVESGGGLVKPGGSLRLSCAASGFTFSDNSMTWMRQAPGKGLEWVSYISSGGAVKFYADSVKGRFTISRDNAKNSLYLQMNSLRADDTAVYYCAREAPLRLGESPHDAFDILGQGTMVTVSS

SEQ ID NO: 1522 - protein, 5 aa, Homo sapiens
DNSMT

SEQ ID NO: 1523 - protein, 17 aa, Homo sapiens
YISSGGGVIFYADSVKG

SEQ ID NO: 1524 - protein, 16 aa, Homo sapiens
EAPLRLGESPHDAFDI

SEQ ID NO: 1525 - protein, 125 aa, Homo sapiens
QVQLVESGGGLVKPGGSLRLSCAASGFTFSDNSMTWMRQAPGKGLEWVSYISSGGGVIFYADSVKGRFTISRDNAKNSLYLQMNSLRADDTAVYYCAREAPLRLGESPHDAFDISGQGTMVTVSS

SEQ ID NO: 1526 - protein, 5 aa, Homo sapiens
DNTMT

SEQ ID NO: 1527 - protein, 17 aa, Homo sapiens
YISTGGGVKFYADSVKG

SEQ ID NO: 1528 - protein, 16 aa, Homo sapiens
EAPLRLGESPHDAFDI

SEQ ID NO: 1529 - protein, 125 aa, Homo sapiens; identical to SEQ ID NO: 1301

SEQ ID NO: 1530 - protein, 5 aa, Homo sapiens
DNSMS

SEQ ID NO: 1531 - protein, 17 aa, Homo sapiens
YISSGGSVKFYADSVKG

SEQ ID NO: 1532 - protein, 16 aa, Homo sapiens
EAPLRLGESPHDAFDI

SEQ ID NO: 1533 - protein, 125 aa, Homo sapiens
QVQLVESGGGLVKPGGSLRLSCAASGFTFSDNTMTWMRQAPGKGLEWVSYISTGGGVKFYADSVKGRFTISRDNAKNSLYLQMNSLRADDTAVYYCAREAPLRLGESPHDAFDIWGQGTMVTVSS

SEQ ID NO: 1534 - protein, 5 aa, Homo sapiens
DNSMT

SEQ ID NO: 1535 - protein, 17 aa, Homo sapiens
YISTGGGVKYYADSVKG

SEQ ID NO: 1536 - protein, 16 aa, Homo sapiens
EAPLRLGESPHDAFDI

SEQ ID NO: 1537 - protein, 125 aa, Homo sapiens
QVQLVESGGGLVKPGGSLRLSCAASGFTFSDNSMSWMRQAPGKGLEWVSYISSGGSVKFYADSVKGRFTISRDNAKNSLYLQMNSLRADDTAVYYCAREAPLRLGESPHDAFDIWGQGTMVTVSS

SEQ ID NO: 1538 - protein, 5 aa, Homo sapiens
DYTMS

SEQ ID NO: 1539 - protein, 17 aa, Homo sapiens
YISTGGGVKFYADSVKG

SEQ ID NO: 1540 - protein, 16 aa, Homo sapiens
EAPLRLGESPHDAFDI

SEQ ID NO: 1541 - protein, 125 aa, Homo sapiens
QVQLVESGGGLVKPGGSLRLSCAASGFTFSDNSMTWMRQAPGKGLEWVSYISTGGGVKYYADSVKGRFTISRDNAKNSLYLQMNSLRADDTAVYYCAREAPLRLGESPHDAFDIWGQGTMVTVSS

SEQ ID NO: 1542 - protein, 5 aa, Homo sapiens
DSSMT

SEQ ID NO: 1543 - protein, 17 aa, Homo sapiens
YISSGGAVKFYTDSVKG

SEQ ID NO: 1544 - protein, 16 aa, Homo sapiens
EAPLRLGESPHDAFDI

SEQ ID NO: 1545 - protein, 125 aa, Homo sapiens
QVQLVESGGGLVKPGGSLRLSCAASGFTFSDSSMTWMRQAPGKGLEWVSYISSGGAVKFYTDSVKGRFTISRDNAKNSLYLQMNSLRADDTAVYYCAREAPLRLGESPHDAFDISGQGTMVTVSS

SEQ ID NO: 1546 - protein, 5 aa, Homo sapiens
DSSMT

SEQ ID NO: 1547 - protein, 17 aa, Homo sapiens
YISSGGGVKFYTDSVKG

SEQ ID NO: 1548 - protein, 16 aa, Homo sapiens
EAPLRLGESPHDAFDI

SEQ ID NO: 1549 - protein, 125 aa, Homo sapiens
EVQLVESGGGLVKPGGSLRLSCAASGFTFSDSSMTWMRQAPGKGLEWVSYISSGGGVKFYTDSVKGRFTISRDNAKNSLYLQMNSLRADDTAVYYCAREAPLRLGESPHDAFDISGQGTMVTVSS

SEQ ID NO: 1550 - protein, 5 aa, Homo sapiens
DSSMT

SEQ ID NO: 1551 - protein, 17 aa, Homo sapiens
YISSGGGVKFYADSVKG

SEQ ID NO: 1552 - protein, 16 aa, Homo sapiens
EAPLRLGESPHDAFDI

SEQ ID NO: 1553 - protein, 125 aa, Homo sapiens
EVQLVESGGGLVKPGGSLRLSCAASGFTFSDSSMTWMRQAPGKGLEWVSYISSGGGVKFYADSVKGRFTISRDNAKNSLYLQMNSLRADDTAVYYCAREAPLRLGESPHDAFDISGQGTMVTVSS

SEQ ID NO: 1554 - protein, 5 aa, Homo sapiens
DSSMT

SEQ ID NO: 1555 - protein, 17 aa, Homo sapiens
YISSGGGVKFYADSVKG

SEQ ID NO: 1556 - protein, 16 aa, Homo sapiens
EAPLRLGESPHDAFDI

SEQ ID NO: 1557 - protein, 125 aa, Homo sapiens
QVQLVESGGGLVKPGGSLRLSCAASGFTFSDSSMTWMRQAPGKGLEWVSYISSGGGVKFYADSVKGRFTISRDNAKNSLYLQMNSLRADDTAVYYCAREAPLRLGESPHDAFDISGQGTMVTVSS

SEQ ID NO: 1558 - protein, 5 aa, Homo sapiens
DSSMT

SEQ ID NO: 1559 - protein, 17 aa, Homo sapiens
YISSGGGVKFYTDSVKG

SEQ ID NO: 1560 - protein, 16 aa, Homo sapiens
EAPLRLGESPHDAFDT

SEQ ID NO: 1561 - protein, 125 aa, Homo sapiens
QVQLVESGGGLVKPGGSLRLSCAASGFTFSDSSMTWMRQAPGKGLEWVSYISSGGGVKFYTDSVKGRFTISRDNAKNSLYLQMDSLRADDTAVYYCAREAPLRLGESPHDAFDTSGQGTMVTVSS

SEQ ID NO: 1562 - protein, 5 aa, Homo sapiens
GSSMT

SEQ ID NO: 1563 - protein, 17 aa, Homo sapiens
YISSGGGVIFYADSVKG

SEQ ID NO: 1564 - protein, 16 aa, Homo sapiens
EAPLRLGESPHDAFDI

SEQ ID NO: 1565 - protein, 125 aa, Homo sapiens
QVQLVESGGGLVKPGGSLRLSCAASGFTFSGSSMTWMRQAPGKGLEWVSYISSGGGVIFYADSVKGRFTISRDNAKNSLYLQMNSLRADDTAVYYCAREAPLRLGESPHDAFDISGQGTMVTVSS

SEQ ID NO: 1566 - protein, 5 aa, Homo sapiens
DNSMT

SEQ ID NO: 1567 - protein, 17 aa, Homo sapiens
YISSGGGVIFYADSVKG

SEQ ID NO: 1568 - protein, 16 aa, Homo sapiens
EAPLRLGESPHDAFDI

SEQ ID NO: 1569 - protein, 125 aa, Homo sapiens
QVQLVESGGGLVKPGGSLRLSCAASGFTFGDNSMTWMRQAPGKGLEWVSYISSGGGVIFYADSVKGRFTISRDNAKNSLYLQMNSLRADDTAVYYCAREAPLRLGESPHDAFDISGRGTTVTVSS

SEQ ID NO: 1570 - protein, 5 aa, Homo sapiens
DNSMS

SEQ ID NO: 1571 - protein, 17 aa, Homo sapiens
YISSGGGVIFYADSVKG

SEQ ID NO: 1572 - protein, 16 aa, Homo sapiens
EAPLRLGESPHDAFDI

SEQ ID NO: 1573 - protein, 125 aa, Homo sapiens
QVQLVESGGGLVKPGGSLRLSCAASGFTFSDNSMSWMRQAPGKGLEWVSYISSGGGVIFYADSVKGRFTISRDNAKNSLYLQMNSLRADDTAVYYCAREAPLRLGESPHDAFDISGQGTMVTVSS

SEQ ID NO: 1574 - protein, 5 aa, Homo sapiens
DSSMT

SEQ ID NO: 1575 - protein, 17 aa, Homo sapiens
YISSGGAVKFYTDSVKG

SEQ ID NO: 1576 - protein, 16 aa, Homo sapiens
EAPLRLGESPHDAFDI

SEQ ID NO: 1577 - protein, 125 aa, Homo sapiens
QVQLVESGGGLVKPGGSLRLSCAASGFTFGDSSMTWMRQAPGKGLEWVSYISSGGAVKFYTDSVKGRFTISRDNAKNSLYLQMNSLRADDTAVYYCAREAPLRLGESPHDAFDISGQGTMVTVSS

SEQ ID NO: 1578 - protein, 5 aa, Homo sapiens
GSSMT

SEQ ID NO: 1579 - protein, 17 aa, Homo sapiens
YISSGGGVKFYTDSVKG

SEQ ID NO: 1580 - protein, 16 aa, Homo sapiens
EAPLRLGESPHDAFDI

SEQ ID NO: 1581 - protein, 124 aa, Homo sapiens
VQLVESGGGLVKPGGSLRLSCAASGFTFGGSSMTWMRQAPGKGLEWVSYISSGGGVKFYTDSVKGRFTISRDNAKNSLYLQMNSLRADDTAVYYCAREAPLRLGESPHDAFDISGQGTMVTVSS

SEQ ID NO: 1582 - protein, 5 aa, Homo sapiens
DSSMS

SEQ ID NO: 1583 - protein, 17 aa, Homo sapiens
YISSGGGVIFYADSVKG

SEQ ID NO: 1584 - protein, 16 aa, Homo sapiens
EAPLRLGESPHDAFDI

SEQ ID NO: 1585 - protein, 125 aa, Homo sapiens
QVQLVESGGGLVKPGGSLRLSCAASGFTFSDSSMSWMRQAPGKGLEWVSYISSGGGVIFYADSVKGRFTISRDNAKNSLYLQMNSLRADDTAVYYCAREAPLRLGESPHDAFDISGQGTMVTVSS

SEQ ID NO: 1586 - protein, 5 aa, Homo sapiens
DSSMT

SEQ ID NO: 1587 - protein, 17 aa, Homo sapiens
YISAGGGVRFYTDSVKG

SEQ ID NO: 1588 - protein, 16 aa, Homo sapiens
EAPLRLGESPHDAFDI

SEQ ID NO: 1589 - protein, 125 aa, Homo sapiens
QVQLVESGGGLVKPGGSLRLSCAATGFTFSDSSMTWMRQAPGKGLEWVSYISAGGGVRFYTDSVKGRFTISRDNAKNSLYLQMNSLRADDTAVYYCAREAPLRLGESPHDAFDISGQGTMVTVSS

SEQ ID NO: 1590 - protein, 5 aa, Homo sapiens
DSSMT

SEQ ID NO: 1591 - protein, 17 aa, Homo sapiens
YISSGGGVKFYTDSVKG

SEQ ID NO: 1592 - protein, 16 aa, Homo sapiens
EAPLRLGESPHDAFDI

SEQ ID NO: 1593 - protein, 125 aa, Homo sapiens
EVQLVESGGGLVKPGGSLRLSCAASGFTFSDSSMTWIRQAPGKGLEWVSYISSGGGVKFYTDSVKGRFTISRDNAKNSLYLQMNSLRADDTAVYYCAREAPLRLGESPHDAFDISGQGTMVTVSS

SEQ ID NO: 1594 - protein, 5 aa, Homo sapiens
DSSMT

SEQ ID NO: 1595 - protein, 17 aa, Homo sapiens
YISSGGGVKFYTDSVKG

SEQ ID NO: 1596 - protein, 16 aa, Homo sapiens
EAPLRLGESPHDAFDI

SEQ ID NO: 1597 - protein, 125 aa, Homo sapiens
EVQLVESGGGLVKPGGSLRLSCAASGFTFSDSSMTWIRQAPGKGLEWVSYISSGGGVKFYTDSVKGRFTISRDNAKNSLYLQMNSLRAEDTAVYYCAREAPLRLGESPHDAFDISGQGTMVTVSS

SEQ ID NO: 1598 - protein, 5 aa, Homo sapiens
DSSMT

SEQ ID NO: 1599 - protein, 17 aa, Homo sapiens
YISSGGGVKFYADSVKG

SEQ ID NO: 1600 - protein, 16 aa, Homo sapiens
EAPLRLGESPHDAFDI

SEQ ID NO: 1601 - protein, 125 aa, Homo sapiens
EVQLVESGGGLVKPGGSLRLSCAASGFTFSDSSMTWIRQAPGKGLEWVSYISSGGGVKFYADSVKGRFTISRDNAKNSLYLQMNSLRADDTAVYYCAREAPLRLGESPHDAFDISGQGTMVTVSS

SEQ ID NO: 1602 - protein, 5 aa, Homo sapiens
DSSMT

SEQ ID NO: 1603 - protein, 17 aa, Homo sapiens
YISSGGGVKFYTDSVKG

SEQ ID NO: 1604 - protein, 16 aa, Homo sapiens
EAPLRLGESPHDAFDI

SEQ ID NO: 1605 - protein, 125 aa, Homo sapiens
EVQLVESGGGLVKPGGSLRLSCAASGFTFSDSSMTWMRQAPGKGLEWVSYISSGGGVKFYTDSVKGRFTISRDNAKNSLYLQMNSLRAEDTAVYYCAREAPLRLGESPHDAFDISGQGTMVTVSS

SEQ ID NO: 1606 - protein, 5 aa, Homo sapiens
DSSMT

SEQ ID NO: 1607 - protein, 17 aa, Homo sapiens
YISSGGGVKFYADSVKG

SEQ ID NO: 1608 - protein, 16 aa, Homo sapiens
EAPLRLGESPHDAFDI

SEQ ID NO: 1609 - protein, 125 aa, Homo sapiens
EVQLVESGGGLVKPGGSLRLSCAASGFTFSDSSMTWIRQAPGKGLEWVSYISSGGGVKFYADSVKGRFTISRDNAKNSLYLQMNSLRAEDTAVYYCAREAPLRLGESPHDAFDISGQGTMVTVSS

SEQ ID NO: 1610 - protein, 5 aa, Homo sapiens
DSSMT

SEQ ID NO: 1611 - protein, 17 aa, Homo sapiens
YISSGGGVKFYADSVKG

SEQ ID NO: 1612 - protein, 16 aa, Homo sapiens
EAPLRLGESPHDAFDI

SEQ ID NO: 1613 - protein, 125 aa, Homo sapiens
EVQLVESGGGLVKPGGSLRLSCAASGFTFSDSSMTWKRQAPGKGLEWVSYISSGGGVKFYADSVKGRFTISRDNAKNSLYLQMNSLRAEDTAVYYCAREAPLRLGESPHDAFDISGQGTMVTVSS

SEQ ID NO: 1614 - protein, 5 aa, Homo sapiens
DSSMT

SEQ ID NO: 1615 - protein, 17 aa, Homo sapiens
YISSGGGVKFYADSVKG

SEQ ID NO: 1616 - protein, 16 aa, Homo sapiens
EAPLRLGESPHDAFDI

SEQ ID NO: 1617 - protein, 125 aa, Homo sapiens
EVQLVESGGGLVKPGGSLRLSCAASGFTFSDSSMTWMRQAPGKGLEWVSYISSGGGVKFYADSVKGRFTISRDNAKNSLYLQMNSLRAEDTAVYYCAREAPLRLGESPHDAFDISGQGTMVTVSS

SEQ ID NO: 1618 - protein, 5 aa, Homo sapiens
DSSMT

SEQ ID NO: 1619 - protein, 17 aa, Homo sapiens
YISSGGGVKFYADSVKG

SEQ ID NO: 1620 - protein, 16 aa, Homo sapiens
EAPLRLGESPHDAFDI

SEQ ID NO: 1621 - protein, 125 aa, Homo sapiens
EVQLVESGGGLVKPGGSLRLSCAASGFTFSDSSMTWVRQAPGKGLEWVSYISSGGGVKFYADSVKGRFTISRDNAKNSLYLQMNSLRAEDTAVYYCAREAPLRLGESPHDAFDISGQGTMVTVSS

SEQ ID NO: 1622 - protein, 5 aa, Homo sapiens
DTSMT

SEQ ID NO: 1623 - protein, 17 aa, Homo sapiens
YISSGGGVKFYTDSVKG

SEQ ID NO: 1624 - protein, 16 aa, Homo sapiens
EAPLRLGESPHDAFDI

SEQ ID NO: 1625 - protein, 125 aa, Homo sapiens
EVQLVESGGGLVKPGGSLRLSCAASGFTFSDTSMTWMRQAPGKGLEWVSYISSGGGVKFYTDSVKGRFTISRDNAKNSLYLQMNSLRAEDTAVYYCAREAPLRLGESPHDAFDISGQGTMVTVSS

SEQ ID NO: 1626 - protein, 5 aa, Homo sapiens
DESMT

SEQ ID NO: 1627 - protein, 17 aa, Homo sapiens
YISSGGGVKFYTDSVKG

SEQ ID NO: 1628 - protein, 16 aa, Homo sapiens
EAPLRLGESPHDAFDI

SEQ ID NO: 1629 - protein, 125 aa, Homo sapiens
EVQLVESGGGLVKPGGSLRLSCAASGFTFSDESMTWFRQAPGKGLEWVSYISSGGGVKFYTDSVKGRFTISRDNAKNSLYLQMNSLRAEDTAVYYCAREAPLRLGESPHDAFDISGQGTMVTVSS

SEQ ID NO: 1630 - protein, 5 aa, Homo sapiens
DESMT

SEQ ID NO: 1631 - protein, 17 aa, Homo sapiens
YISSGGGVKFYTDSVKG

SEQ ID NO: 1632 - protein, 16 aa, Homo sapiens
EAPLRLGESPHDAFDI

SEQ ID NO: 1633 - protein, 125 aa, Homo sapiens
EVQLVESGGGLVKPGGSLRLSCAASGFTFSDESMTWMRQAPGKGLEWVSYISSGGGVKFYTDSVKGRFTISRDNAKNSLYLQMNSLRAEDTAVYYCAREAPLRLGESPHDAFDISGQGTMVTVSS

SEQ ID NO: 1634 - protein, 5 aa, Homo sapiens
DYSMT

SEQ ID NO: 1635 - protein, 17 aa, Homo sapiens
YISSGGGVKFYTDSVKG

SEQ ID NO: 1636 - protein, 16 aa, Homo sapiens
EAPLRLGESPHDAFDI

SEQ ID NO: 1637 - protein, 125 aa, Homo sapiens
EVQLVESGGGLVKPGGSLRLSCAASGFTFSDYSMTWMRQAPGKGLEWVSYISSGGGVKFYTDSVKGRFTISRDNAKNSLYLQMNSLRAEDTAVYYCAREAPLRLGESPHDAFDISGQGTMVTVSS

SEQ ID NO: 1638 - protein, 5 aa, Homo sapiens
DASMT

SEQ ID NO: 1639 - protein, 17 aa, Homo sapiens
YISSGGGVKFYTDSVKG

SEQ ID NO: 1640 - protein, 16 aa, Homo sapiens
EAPLRLGESPHDAFDI

SEQ ID NO: 1641 - protein, 125 aa, Homo sapiens
EVQLVESGGGLVKPGGSLRLSCAASGFTFSDASMTWMRQAPGKGLEWVSYISSGGGVKFYTDSVKGRFTISRDNAKNSLYLQMNSLRAEDTAVYYCAREAPLRLGESPHDAFDISGQGTMVTVSS

SEQ ID NO: 1642 - protein, 5 aa, Homo sapiens
DKSMT

SEQ ID NO: 1643 - protein, 17 aa, Homo sapiens
YISSGGGVKFYTDSVKG

SEQ ID NO: 1644 - protein, 16 aa, Homo sapiens
EAPLRLGESPHDAFDI

SEQ ID NO: 1645 - protein, 125 aa, Homo sapiens
EVQLVESGGGLVKPGGSLRLSCAASGFTFSDKSMTWMRQAPGKGLEWVSYISSGGGVKFYTDSVKGRFTISRDNAKNSLYLQMNSLRAEDTAVYYCAREAPLRLGESPHDAFDISGQGTMVTVSS

SEQ ID NO: 1646 - protein, 5 aa, Homo sapiens
DRSMT

SEQ ID NO: 1647 - protein, 17 aa, Homo sapiens
YISSGGGVKFYTDSVKG

SEQ ID NO: 1648 - protein, 16 aa, Homo sapiens
EAPLRLGESPHDAFDI

SEQ ID NO: 1649 - protein, 125 aa, Homo sapiens
EVQLVESGGGLVKPGGSLRLSCAASGFTFSDRSMTWMRQAPGKGLEWVSYISSGGGVKFYTDSVKGRFTISRDNAKNSLYLQMNSLRAEDTAVYYCAREAPLRLGESPHDAFDISGQGTMVTVSS

SEQ ID NO: 1650 - protein, 5 aa, Homo sapiens
DYSMT

SEQ ID NO: 1651 - protein, 17 aa, Homo sapiens
YISSGGGVKFYADSVKG

SEQ ID NO: 1652 - protein, 16 aa, Homo sapiens
EAPLRLGESPHDAFDI

SEQ ID NO: 1653 - protein, 125 aa, Homo sapiens
EVQLVESGGGLVKPGGSLRLSCAASGFTFSDYSMTWMRQAPGKGLEWVSYISSGGGVKFYADSVKGRFTISRDNAKNSLYLQMNSLRAEDTAVYYCAREAPLRLGESPHDAFDISGQGTMVTVSS

SEQ ID NO: 1654 - protein, 5 aa, Homo sapiens
DVSMT

SEQ ID NO: 1655 - protein, 17 aa, Homo sapiens
YISSGGGVKFYADSVKG

SEQ ID NO: 1656 - protein, 16 aa, Homo sapiens
EAPLRLGESPHDAFDI

SEQ ID NO: 1657 - protein, 125 aa, Homo sapiens
EVQLVESGGGLVKPGGSLRLSCAASGFTFSDVSMTWMRQAPGKGLEWVSYISSGGGVKFYADSVKGRFTISRDNAKNSLYLQMNSLRAEDTAVYYCAREAPLRLGESPHDAFDISGQGTMVTVSS

SEQ ID NO: 1658 - protein, 5 aa, Homo sapiens
DQSMT

SEQ ID NO: 1659 - protein, 17 aa, Homo sapiens
YISSGGGVKFYADSVKG

SEQ ID NO: 1660 - protein, 16 aa, Homo sapiens
EAPLRLGESPHDAFDI

SEQ ID NO: 1661 - protein, 125 aa, Homo sapiens
EVQLVESGGGLVKPGGSLRLSCAASGFTFSDQSMTWMRQAPGKGLEWVSYISSGGGVKFYADSVKGRFTISRDNAKNSLYLQMNSLRAEDTAVYYCAREAPLRLGESPHDAFDISGQGTMVTVSS

SEQ ID NO: 1662 - protein, 5 aa, Homo sapiens
DESMT

SEQ ID NO: 1663 - protein, 17 aa, Homo sapiens
YISSGGGVKFYADSVKG

SEQ ID NO: 1664 - protein, 16 aa, Homo sapiens
EAPLRLGESPHDAFDI

SEQ ID NO: 1665 - protein, 125 aa, Homo sapiens
EVQLVESGGGLVKPGGSLRLSCAASGFTFSDESMTWMRQAPGKGLEWVSYISSGGGVKFYADSVKGRFTISRDNAKNSLYLQMNSLRAEDTAVYYCAREAPLRLGESPHDAFDISGQGTMVTVSS

SEQ ID NO: 1666 - protein, 5 aa, Homo sapiens
DASMT

SEQ ID NO: 1667 - protein, 17 aa, Homo sapiens
YISSGGGVKFYADSVKG

SEQ ID NO: 1668 - protein, 16 aa, Homo sapiens
EAPLRLGESPHDAFDI

SEQ ID NO: 1669 - protein, 125 aa, Homo sapiens
EVQLVESGGGLVKPGGSLRLSCAASGFTFSDASMTWMRQAPGKGLEWVSYISSGGGVKFYADSVKGRFTISRDNAKNSLYLQMNSLRAEDTAVYYCAREAPLRLGESPHDAFDISGQGTMVTVSS

SEQ ID NO: 1670 - protein, 5 aa, Homo sapiens
DWSMT

SEQ ID NO: 1671 - protein, 17 aa, Homo sapiens
YISSGGGVKFYADSVKG

SEQ ID NO: 1672 - protein, 16 aa, Homo sapiens
EAPLRLGESPHDAFDI

SEQ ID NO: 1673 - protein, 125 aa, Homo sapiens
EVQLVESGGGLVKPGGSLRLSCAASGFTFSDWSMTWMRQAPGKGLEWVSYISSGGGVKFYADSVKGRFTISRDNAKNSLYLQMNSLRAEDTAVYYCAREAPLRLGESPHDAFDISGQGTMVTVSS

SEQ ID NO: 1674 - protein, 5 aa, Homo sapiens
DGSMT

SEQ ID NO: 1675 - protein, 17 aa, Homo sapiens
YISSGGGVKFYADSVKG

SEQ ID NO: 1676 - protein, 16 aa, Homo sapiens
EAPLRLGESPHDAFDI

SEQ ID NO: 1677 - protein, 125 aa, Homo sapiens
EVQLVESGGGLVKPGGSLRLSCAASGFTFSDGSMTWMRQAPGKGLEWVSYISSGGGVKFYADSVKGRFTISRDNAKNSLYLQMNSLRAEDTAVYYCAREAPLRLGESPHDAFDISGQGTMVTVSS

SEQ ID NO: 1678 - protein, 5 aa, Homo sapiens
DTSMT

SEQ ID NO: 1679 - protein, 17 aa, Homo sapiens
YISSGGGVKFYADSVKG

SEQ ID NO: 1680 - protein, 16 aa, Homo sapiens
EAPLRLGESPHDAFDI

SEQ ID NO: 1681 - protein, 125 aa, Homo sapiens
EVQLVESGGGLVKPGGSLRLSCAASGFTFSDTSMTWMRQAPGKGLEWVSYISSGGGVKFYADSVKGRFTISRDNAKNSLYLQMNSLRAEDTAVYYCAREAPLRLGESPHDAFDISGQGTMVTVSS

SEQ ID NO: 1682 - protein, 5 aa, Homo sapiens
DISMT

SEQ ID NO: 1683 - protein, 17 aa, Homo sapiens
YISSGGGVKFYADSVKG

SEQ ID NO: 1684 - protein, 16 aa, Homo sapiens
EAPLRLGESPHDAFDI

SEQ ID NO: 1685 - protein, 125 aa, Homo sapiens
EVQLVESGGGLVKPGGSLRLSCAASGFTFSDISMTWMRQAPGKGLEWVSYISSGGGVKFYADSVKGRFTISRDNAKNSLYLQMNSLRAEDTAVYYCAREAPLRLGESPHDAFDISGQGTMVTVSS

SEQ ID NO: 1686 - protein, 5 aa, Homo sapiens
DKSMT

SEQ ID NO: 1687 - protein, 17 aa, Homo sapiens
YISSGGGVKFYADSVKG

SEQ ID NO: 1688 - protein, 16 aa, Homo sapiens
EAPLRLGESPHDAFDI

SEQ ID NO: 1689 - protein, 125 aa, Homo sapiens
EVQLVESGGGLVKPGGSLRLSCAASGFTFSDKSMTWMRQAPGKGLEWVSYISSGGGVKFYADSVKGRFTISRDNAKNSLYLQMNSLRAEDTAVYYCAREAPLRLGESPHDAFDISGQGTMVTVSS

SEQ ID NO: 1690 - protein, 5 aa, Homo sapiens
DRSMT

SEQ ID NO: 1691 - protein, 17 aa, Homo sapiens
YISSGGGVKFYADSVKG

SEQ ID NO: 1692 - protein, 16 aa, Homo sapiens
EAPLRLGESPHDAFDI

SEQ ID NO: 1693 - protein, 125 aa, Homo sapiens
EVQLVESGGGLVKPGGSLRLSCAASGFTFSDRSMTWMRQAPGKGLEWVSYISSGGGVKFYADSVKGRFTISRDNAKNSLYLQMNSLRAEDTAVYYCAREAPLRLGESPHDAFDISGQGTMVTVSS

SEQ ID NO: 1694 - protein, 5 aa, Homo sapiens
DLSMT

SEQ ID NO: 1695 - protein, 17 aa, Homo sapiens
YISSGGGVKFYADSVKG

SEQ ID NO: 1696 - protein, 16 aa, Homo sapiens
EAPLRLGESPHDAFDI

SEQ ID NO: 1697 - protein, 125 aa, Homo sapiens
EVQLVESGGGLVKPGGSLRLSCAASGFTFSDLSMTWMRQAPGKGLEWVSYISSGGGVKFYADSVKGRFTISRDNAKNSLYLQMNSLRAEDTAVYYCAREAPLRLGESPHDAFDISGQGTMVTVSS

SEQ ID NO: 1698 - protein, 5 aa, Homo sapiens
DFSMT

SEQ ID NO: 1699 - protein, 17 aa, Homo sapiens
YISSGGGVKFYADSVKG

SEQ ID NO: 1700 - protein, 16 aa, Homo sapiens
EAPLRLGESPHDAFDI

SEQ ID NO: 1701 - protein, 125 aa, Homo sapiens
EVQLVESGGGLVKPGGSLRLSCAASGFTFSDFSMTWMRQAPGKGLEWVSYISSGGGVKFYADSVKGRFTISRDNAKNSLYLQMNSLRAEDTAVYYCAREAPLRLGESPHDAFDISGQGTMVTVSS

SEQ ID NO: 1702 - protein, 5 aa, Homo sapiens
DESVT

SEQ ID NO: 1703 - protein, 17 aa, Homo sapiens
YISSGGGVKFYTDSVKG

SEQ ID NO: 1704 - protein, 16 aa, Homo sapiens
EAPLRLGESPHDAFDI

SEQ ID NO: 1705 - protein, 125 aa, Homo sapiens
EVQLVESGGGLVKPGGSLRLSCAASGFTFSDESVTWMRQAPGKGLEWVSYISSGGGVKFYTDSVKGRFTISRDNAKNSLYLQMNSLRAEDTAVYYCAREAPLRLGESPHDAFDISGQGTMVTVSS

SEQ ID NO: 1706 - protein, 5 aa, Homo sapiens
DESQT

SEQ ID NO: 1707 - protein, 17 aa, Homo sapiens
YISSGGGVKFYTDSVKG

SEQ ID NO: 1708 - protein, 16 aa, Homo sapiens
EAPLRLGESPHDAFDI

SEQ ID NO: 1709 - protein, 125 aa, Homo sapiens
EVQLVESGGGLVKPGGSLRLSCAASGFTFSDESQTWMRQAPGKGLEWVSYISSGGGVKFYTDSVKGRFTISRDNAKNSLYLQMNSLRAEDTAVYYCAREAPLRLGESPHDAFDISGQGTMVTVSS

SEQ ID NO: 1710 - protein, 5 aa, Homo sapiens
DESFT

SEQ ID NO: 1711 - protein, 17 aa, Homo sapiens
YISSGGGVKFYTDSVKG

SEQ ID NO: 1712 - protein, 16 aa, Homo sapiens
EAPLRLGESPHDAFDI

SEQ ID NO: 1713 - protein, 125 aa, Homo sapiens
EVQLVESGGGLVKPGGSLRLSCAASGFTFSDESFTWMRQAPGKGLEWVSYISSGGGVKFYTDSVKGRFTISRDNAKNSLYLQMNSLRAEDTAVYYCAREAPLRLGESPHDAFDISGQGTMVTVSS

SEQ ID NO: 1714 - protein, 5 aa, Homo sapiens
DESLT

SEQ ID NO: 1715 - protein, 17 aa, Homo sapiens
YISSGGGVKFYTDSVKG

SEQ ID NO: 1716 - protein, 16 aa, Homo sapiens
EAPLRLGESPHDAFDI

SEQ ID NO: 1717 - protein, 125 aa, Homo sapiens
EVQLVESGGGLVKPGGSLRLSCAASGFTFSDESLTWMRQAPGKGLEWVSYISSGGGVKFYTDSVKGRFTISRDNAKNSLYLQMNSLRAEDTAVYYCAREAPLRLGESPHDAFDISGQGTMVTVSS

SEQ ID NO: 1718 - protein, 5 aa, Homo sapiens
DESKT

SEQ ID NO: 1719 - protein, 17 aa, Homo sapiens
YISSGGGVKFYTDSVKG

SEQ ID NO: 1720 - protein, 16 aa, Homo sapiens
EAPLRLGESPHDAFDI

SEQ ID NO: 1721 - protein, 125 aa, Homo sapiens
EVQLVESGGGLVKPGGSLRLSCAASGFTFSDESKTWMRQAPGKGLEWVSYISSGGGVKFYTDSVKGRFTISRDNAKNSLYLQMNSLRAEDTAVYYCAREAPLRLGESPHDAFDISGQGTMVTVSS

SEQ ID NO: 1722 - protein, 5 aa, Homo sapiens
DESYT

SEQ ID NO: 1723 - protein, 17 aa, Homo sapiens
YISSGGGVKFYTDSVKG

SEQ ID NO: 1724 - protein, 16 aa, Homo sapiens
EAPLRLGESPHDAFDI

SEQ ID NO: 1725 - protein, 125 aa, Homo sapiens
EVQLVESGGGLVKPGGSLRLSCAASGFTFSDESYTWMRQAPGKGLEWVSYISSGGGVKFYTDSVKGRFTISRDNAKNSLYLQMNSLRAEDTAVYYCAREAPLRLGESPHDAFDISGQGTMVTVSS

SEQ ID NO: 1726 - protein, 5 aa, Homo sapiens
DESAT

SEQ ID NO: 1727 - protein, 17 aa, Homo sapiens
YISSGGGVKFYADSVKG

SEQ ID NO: 1728 - protein, 16 aa, Homo sapiens
EAPLRLGESPHDAFDI

SEQ ID NO: 1729 - protein, 125 aa, Homo sapiens
EVQLVESGGGLVKPGGSLRLSCAASGFTFSDESATWMRQAPGKGLEWVSYISSGGGVKFYADSVKGRFTISRDNAKNSLYLQMNSLRAEDTAVYYCAREAPLRLGESPHDAFDISGQGTMVTVSS

SEQ ID NO: 1730 - protein, 5 aa, Homo sapiens
DESFT

SEQ ID NO: 1731 - protein, 17 aa, Homo sapiens
YISSGGGVKFYADSVKG

SEQ ID NO: 1732 - protein, 16 aa, Homo sapiens
EAPLRLGESPHDAFDI

SEQ ID NO: 1733 - protein, 125 aa, Homo sapiens
EVQLVESGGGLVKPGGSLRLSCAASGFTFSDESFTWMRQAPGKGLEWVSYISSGGGVKFYADSVKGRFTISRDNAKNSLYLQMNSLRAEDTAVYYCAREAPLRLGESPHDAFDISGQGTMVTVSS

SEQ ID NO: 1734 - protein, 5 aa, Homo sapiens
DESNT

SEQ ID NO: 1735 - protein, 17 aa, Homo sapiens
YISSGGGVKFYADSVKG

SEQ ID NO: 1736 - protein, 16 aa, Homo sapiens
EAPLRLGESPHDAFDI

SEQ ID NO: 1737 - protein, 125 aa, Homo sapiens
EVQLVESGGGLVKPGGSLRLSCAASGFTFSDESNTWMRQAPGKGLEWVSYISSGGGVKFYADSVKGRFTISRDNAKNSLYLQMNSLRAEDTAVYYCAREAPLRLGESPHDAFDISGQGTMVTVSS

SEQ ID NO: 1738 - protein, 5 aa, Homo sapiens
DESWT

SEQ ID NO: 1739 - protein, 17 aa, Homo sapiens
YISSGGGVKFYADSVKG

SEQ ID NO: 1740 - protein, 16 aa, Homo sapiens
EAPLRLGESPHDAFDI

SEQ ID NO: 1741 - protein, 125 aa, Homo sapiens
EVQLVESGGGLVKPGGSLRLSCAASGFTFSDESWTWMRQAPGKGLEWVSYISSGGGVKFYADSVKGRFTISRDNAKNSLYLQMNSLRAEDTAVYYCAREAPLRLGESPHDAFDISGQGTMVTVSS

SEQ ID NO: 1742 - protein, 5 aa, Homo sapiens
DESIT

SEQ ID NO: 1743 - protein, 17 aa, Homo sapiens
YISSGGGVKFYADSVKG

SEQ ID NO: 1744 - protein, 16 aa, Homo sapiens
EAPLRLGESPHDAFDI

SEQ ID NO: 1745 - protein, 125 aa, Homo sapiens
EVQLVESGGGLVKPGGSLRLSCAASGFTFSDESITWMRQAPGKGLEWVSYISSGGGVKFYADSVKGRFTISRDNAKNSLYLQMNSLRAEDTAVYYCAREAPLRLGESPHDAFDISGQGTMVTVSS

SEQ ID NO: 1746 - protein, 5 aa, Homo sapiens
DESST

SEQ ID NO: 1747 - protein, 17 aa, Homo sapiens
YISSGGGVKFYADSVKG

SEQ ID NO: 1748 - protein, 16 aa, Homo sapiens
EAPLRLGESPHDAFDI

SEQ ID NO: 1749 - protein, 125 aa, Homo sapiens
EVQLVESGGGLVKPGGSLRLSCAASGFTFSDESSTWMRQAPGKGLEWVSYISSGGGVKFYADSVKGRFTISRDNAKNSLYLQMNSLRAEDTAVYYCAREAPLRLGESPHDAFDISGQGTMVTVSS

SEQ ID NO: 1750 - protein, 5 aa, Homo sapiens
DESHT

SEQ ID NO: 1751 - protein, 17 aa, Homo sapiens
YISSGGGVKFYADSVKG

SEQ ID NO: 1752 - protein, 16 aa, Homo sapiens
EAPLRLGESPHDAFDI

SEQ ID NO: 1753 - protein, 125 aa, Homo sapiens
EVQLVESGGGLVKPGGSLRLSCAASGFTFSDESHTWMRQAPGKGLEWVSYISSGGGVKFYADSVKGRFTISRDNAKNSLYLQMNSLRAEDTAVYYCAREAPLRLGESPHDAFDISGQGTMVTVSS

SEQ ID NO: 1754 - protein, 5 aa, Homo sapiens
DESGT

SEQ ID NO: 1755 - protein, 17 aa, Homo sapiens
YISSGGGVKFYADSVKG

SEQ ID NO: 1756 - protein, 16 aa, Homo sapiens
EAPLRLGESPHDAFDI

SEQ ID NO: 1757 - protein, 125 aa, Homo sapiens
EVQLVESGGGLVKPGGSLRLSCAASGFTFSDESGTWMRQAPGKGLEWVSYISSGGGVKFYADSVKGRFTISRDNAKNSLYLQMNSLRAEDTAVYYCAREAPLRLGESPHDAFDISGQGTMVTVSS

SEQ ID NO: 1758 - protein, 441 aa, Artificial
  Multispecific construct
EVQLVESGGGLVQPGRSLRLSCAASGFTFDDYALHWVRQAPGKDLEWVSGISWNGGSYGYADSVKGRFTISRDNAKNSLYLQMNSLRAEDTALYYCVREKGPGLTGSTADYYGLDAWGQGTMVTVSSGGGGSGGGGSGGGGSGGGGSGGGGSGGGGSEVQLVESGGGVVQPGGSLRLSCAASGFTFSNYGMHWVRQAPGKGLEWVAVISNDGNTKTYADSVKGRFTISRDNSKNTLYLQMNSLRAEDTAVYYCAQDETTTVTASYYFDYWGQGTLVTVSSGGGGSGGGGSGGGGSGGGGSGGGGSGGGGSEVQLVESGGGLVKPGGSLRLSCAASGFTFSNYNMNWVRQAPGKGLEWVSSISSAGTHIYYADSVKGRFTISRDNAKNSLYLQMNSLRAEDTAVYYCARDPHSTGWYKDFDYWGQGTLVTVSSAAAHHHHHH

SEQ ID NO: 1759 - DNA, 1323 bp, Artificial
  Multispecific construct
gaggtgcagctggtggagtctgggggaggcttggtacagcctggcaggtccctgagactctcctgtgcagcctctggattcacctttgacgattatgccctacactgggtccggcaagctccagggaaggacctggagtgggtctcaggtattagttggaatggtggtagctacggctacgcggactctgtgaagggccgattcaccatctccagagacaacgccaagaactccctgtatctgcaaatgaacagtctgagagctgaggacacggccttgtattattgtgtaagagaaaaggggcccggcttaactggaagtacggccgattactacggtttggacgcctggggccaagggaccatggtcaccgtctcctcaggtggtggcggttcaggcggaggtggctctggaggtggaggttcaggaggtggtggttctggcggcggtggatcgggtggaggtggtagtgaggtgcagctggtggagtctgggggaggcgttgtccagcctggggggtccctgagactctcctgtgcagcctctggattcaccttcagtaattatggcatgcactgggtccgccaggctccaggcaagggcctggagtgggtggcagtcatatcaaatgatggaaatactaaaacctatgcagattccgtgaagggccgattcaccatctccagagacaattccaagaacacgttatatctgcaaatgaacagcctgagagctgaggacacggctgtgtattactgtgcgcaagatgagacgactacagtaactgcgtcgtattactttgactactggggccagggaaccctggtcaccgtctcctcaggcggaggtggctctggaggaggaggttcaggaggtggtggatctggaggaggcggatcggggggtggaggaagtggcggcggtggtagtgaggtgcagctggtggagtctgggggaggcctggtcaagcctggggggtccctgagactctcctgtgcagcctctggattcaccttcagtaactataacatgaactgggtccgccaggctccagggaaggggctggagtgggtctcatcgattagtagtgctggtactcacatatactacgcagactcagtgaagggccgattcaccatctccagagacaacgccaagaattcactgtatctgcaaatgaacagcctgagagccgaggacacagctgtttattactgtgcgagagatcctcatagcactggctggtacaaggactttgactactggggccagggaaccctggtcaccgtctcctcagcggccgcacaccaccatcatcaccac

SEQ ID NO: 1760 - protein, 441 aa, Artificial
  Multispecific construct
EVQLVESGGGLVQPGRSLRLSCAASGFTFDDYALHWVRQAPGKDLEWVSGISWNGGSYGYADSVKGRFTISRDNAKNSLYLQMNSLRAEDTALYYCVREKGPGLTGSTADYYGLDAWGQGTMVTVSSGGGGSGGGGSGGGGSGGGGSGGGGSGGGGSEVQLVESGGGVVQPGGSLRLSCAASGFTFSNYGMHWVRQAPGKGLEWVAVISNDGNTKTYADSVKGRFTISRDNSKNTLYLQMNSLRAEDTAVYYCAQDETTTVTASYYFDYWGQGTLVTVSSGGGGSGGGGSGGGGSGGGGSGGGGSGGGGSEVQLLESGGGLVKPGGSLRLSCAASGFTVSSYTMNWVRQAPGKGLEWVSSISSSGRYIYYADSVKGRFTISRDNAKNSLYLQMNSLRAEDTAVYYCARDPRMVGNPHEFDIWGQGTMVTVSSAAAHHHHHH

SEQ ID NO: 1761 - DNA, 1323 bp, Artificial
  Multispecific construct
gaggtgcagctggtggagtctgggggaggcttggtacagcctggcaggtccctgagactctcctgtgcagcctctggattcacctttgacgattatgccctacactgggtccggcaagctccagggaaggacctggagtgggtctcaggtattagttggaatggtggtagctacggctacgcggactctgtgaagggccgattcaccatctccagagacaacgccaagaactccctgtatctgcaaatgaacagtctgagagctgaggacacggccttgtattattgtgtaagagaaaaggggcccggcttaactggaagtacggccgattactacggtttggacgcctggggccaagggaccatggtcaccgtctcctcaggtggtggcggttcaggcggaggtggctctggaggtggaggttcaggaggtggtggttctggcggcggtggatcgggtggaggtggtagtgaggtgcagctggtggagtctgggggaggcgttgtccagcctggggggtccctgagactctcctgtgcagcctctggattcaccttcagtaattatggcatgcactgggtccgccaggctccaggcaagggcctggagtgggtggcagtcatatcaaatgatggaaatactaaaacctatgcagattccgtgaagggccgattcaccatctccagagacaattccaagaacacgttatatctgcaaatgaacagcctgagagctgaggacacggctgtgtattactgtgcgcaagatgagacgactacagtaactgcgtcgtattactttgactactggggccagggaaccctggtcaccgtctcctcaggcggaggtggctctggaggaggaggttcaggaggtggtggatctggaggaggcggatcggggggtggaggaagtggcggcggtggtagtgaggtgcagctgttggagtctgggggaggcctggtcaagccgggggggtccctgagactctcctgtgcagcctctggattcaccgtcagtagctataccatgaactgggtccgccaggctccggggaaggggctggagtgggtctcatccattagtagtagtggtcgttacatatactacgcagactcagtgaagggccgattcaccatctccagagacaacgccaagaactcattatatctgcaaatgaacagcctgagagccgaggacacagctgtatattattgtgcgagagatccccgtatggttgggaacccccatgaatttgatatctggggccaagggacaatggtcaccgtctcctcagcggccgcacaccaccatcatcaccac

SEQ ID NO: 1762 - protein, 437 aa, Artificial
  Multispecific construct
EVQLVESGGGVVRPGGSLRLSCAASGFTFDDYAMSWVRQAPGKGLEWVSGITWNAGSTGYADSVKGRFTISRDNAKNSLYLQMNSLRAEDTALYYCVRDKYSYAWSYDDFDIWGQGTMVTVSSGGGGSGGGGSGGGGSGGGGSGGGGSGGGGSEVQLVESGGGVVQPGGSLRLSCAASGFTFSNYGMHWVRQAPGKGLEWVAVISNDGNTKTYADSVKGRFTISRDNSKNTLYLQMNSLRAEDTAVYYCAQDETTTVTASYYFDYWGQGTLVTVSSGGGGSGGGGSGGGGSGGGGSGGGGSGGGGSEVQLVESGGGLVKPGGSLRLSCAASGFTFSNYNMNWVRQAPGKGLEWVSSISSAGTHIYYADSVKGRFTISRDNAKNSLYLQMNSLRAEDTAVYYCARDPHSTGWYKDFDYWGQGTLVTVSSAAAHHHHHH

SEQ ID NO: 1763 - DNA, 1311 bp, Artificial
  Multispecific construct
gaggtgcagctggtggagtctgggggaggtgtggtacggcctggggggtccctgagactctcctgtgcagcctctggattcacctttgatgattatgccatgagttgggtccgccaagctccagggaaggggctggagtgggtctctggtattacttggaatgccggtagcacaggttatgcagactctgtgaagggccgattcaccatctccagagacaacgccaagaactccctgtatctgcaaatgaatagtctgagagccgaggacacggccttgtattactgtgtgagagacaagtatagctatgcctggtcttatgatgattttgatatctggggccaagggacaatggtcaccgtctcctcaggtggtggcggttcaggcggaggtggctctggaggtggaggttcaggaggtggtggttctggcggcggtggatcgggtggaggtggtagtgaggtgcagctggtggagtctgggggaggcgttgtccagcctggggggtccctgagactctcctgtgcagcctctggattcaccttcagtaattatggcatgcactgggtccgccaggctccaggcaagggcctggagtgggtggcagtcatatcaaatgatggaaatactaaaacctatgcagattccgtgaagggccgattcaccatctccagagacaattccaagaacacgttatatctgcaaatgaacagcctgagagctgaggacacggctgtgtattactgtgcgcaagatgagacgactacagtaactgcgtcgtattactttgactactggggccagggaaccctggtcaccgtctcctcaggcggaggtggctctggaggaggaggttcaggaggtggtggatctggaggaggcggatcggggggtggaggaagtggcggcggtggtagtgaggtgcagctggtggagtctgggggaggcctggtcaagcctggggggtccctgagactctcctgtgcagcctctggattcaccttcagtaactataacatgaactgggtccgccaggctccagggaaggggctggagtgggtctcatcgattagtagtgctggtactcacatatactacgcagactcagtgaagggccgattcaccatctccagagacaacgccaagaactcactgtatctgcaaatgaacagcctgagagccgaggacacagctgtttattactgtgcgagagatcctcatagcactggctggtacaaggactttgactactggggccagggaaccctggtcaccgtctcctcagcggccgcacaccaccatcatcaccac

SEQ ID NO: 1764 - protein, 437 aa, Artificial
  Multispecific construct
EVQLVESGGGVVRPGGSLRLSCAASGFTFDDYAMSWVRQAPGKGLEWVSGITWNAGSTGYADSVKGRFTISRDNAKNSLYLQMNSLRAEDTALYYCVRDKYSYAWSYDDFDIWGQGTMVTVSSGGGGSGGGGSGGGGSGGGGSGGGGSGGGGSEVQLVESGGGVVQPGGSLRLSCAASGFTFSNYGMHWVRQAPGKGLEWVAVISNDGNTKTYADSVKGRFTISRDNSKNTLYLQMNSLRAEDTAVYYCAQDETTTVTASYYFDYWGQGTLVTVSSGGGGSGGGGSGGGGSGGGGSGGGGSGGGGSEVQLLESGGGLVKPGGSLRLSCAASGFTVSSYTMNWVRQAPGKGLEWVSSISSSGRYIYYADSVKGRFTISRDNAKNSLYLQMNSLRAEDTAVYYCARDPRMVGNPHEFDIWGQGTMVTVSSAAAHHHHHH

SEQ ID NO: 1765 - DNA, 1311 bp, Artificial
  Multispecific construct
gaggtgcagctggtggagtctgggggaggtgtggtacggcctggggggtccctgagactctcctgtgcagcctctggattcacctttgatgattatgccatgagttgggtccgccaagctccagggaaggggctggagtgggtctctggtattacttggaatgccggtagcacaggttatgcagactctgtgaagggccgattcaccatctccagagacaacgccaagaactccctgtatctgcaaatgaacagtctgagagccgaggacacggccttgtattactgtgtgagagacaagtatagctatgcctggtcttatgatgattttgatatctggggccaagggacaatggtcaccgtctcctcaggtggtggcggttcaggcggaggtggctctggaggtggaggttcaggaggtggtggttctggcggcggtggatcgggtggaggtggtagtgaggtgcagctggtggagtctgggggaggcgttgtccagcctggggggtccctgagactctcctgtgcagcctctggattcaccttcagtaattatggcatgcactgggtccgccaggctccaggcaagggcctggagtgggtggcagtcatatcaaatgatggaaatactaaaacctatgcagattccgtgaagggccgattcaccatctccagagacaattccaagaacacgttatatctgcaaatgaacagcctgagagctgaggacacggctgtgtattactgtgcgcaagatgagacgactacagtaactgcgtcgtattactttgactactggggccagggaaccctggtcaccgtctcctcaggcggaggtggctctggaggaggaggttcaggaggtggtggatctggaggaggcggatcggggggtggaggaagtggcggcggtggtagtgaggtgcagctgttggagtctgggggaggcctggtcaagccgggggggtccctgagactctcctgtgcagcctctggattcaccgtcagtagctataccatgaactgggtccgccaggctccggggaaggggctggagtgggtctcatccattagtagtagtggtcgttacatatactacgcagactcagtgaagggccgattcaccatctccagagacaacgccaagaactcattatatctgcaaatgaacagcctgagagccgaggacacagctgtatattattgtgcgagagatccccgtatggttgggaacccccatgaatttgatatctggggccaagggacaatggtcaccgtctcctcagcggccgcacaccaccatcatcaccac

SEQ ID NO: 1766 - protein, 437 aa, Artificial
  Multispecific construct
EVQLVESGGGVVRPGGSLRLSCAASGFTFDDYAMSWVRQAPGKGLEWVSGITWNGGSTGYADSVKDRFTISRDNAKNSLYLQMNSLRAEDTALYYCVRDKYSYAWSYDDFDIWGQGTMVTVSSGGGGSGGGGSGGGGSGGGGSGGGGSGGGGSEVQLVESGGGVVQPGGSLRLSCAASGFTFSNYGMHWVRQAPGKGLEWVAVISNDGNTKTYADSVKGRFTISRDNSKNTLYLQMNSLRAEDTAVYYCAQDETTTVTASYYFDYWGQGTLVTVSSGGGGSGGGGSGGGGSGGGGSGGGGSGGGGSEVQLVESGGGLVKPGGSLRLSCAASGFTFSNYNMNWVRQAPGKGLEWVSSISSAGTHIYYADSVKGRFTISRDNAKNSLYLQMNSLRAEDTAVYYCARDPHSTGWYKDFDYWGQGTLVTVSSAAAHHHHHH

SEQ ID NO: 1767 - DNA, 1311 bp, Artificial
  Multispecific construct
gaggtgcagctggtggagtctgggggaggtgtggtacggcctggggggtccctgagactctcctgtgcagcctctggattcacctttgatgattatgccatgagttgggtccgccaagctccagggaaggggctggagtgggtctctggtattacttggaatggtggtagcacaggttatgcagactctgtgaaggaccgattcaccatctccagagacaacgccaagaactccctgtatctgcaaatgaacagtctgagagccgaggacacggccttgtattactgtgtgagagacaagtatagctatgcctggtcttatgatgattttgatatctggggccaagggacaatggtcaccgtctcctcaggtggtggcggttcaggcggaggtggctctggaggtggaggttcaggaggtggtggttctggcggcggtggatcgggtggaggtggtagtgaggtgcagctggtggagtctgggggaggcgttgtccagcctggggggtccctgagactctcctgtgcagcctctggattcaccttcagtaattatggcatgcactgggtccgccaggctccaggcaagggcctggagtgggtggcagtcatatcaaatgatggaaatactaaaacctatgcagattccgtgaagggccgattcaccatctccagagacaattccaagaacacgttatatctgcaaatgaacagcctgagagctgaggacacggctgtgtattactgtgcgcaagatgagacgactacagtaactgcgtcgtattactttgactactggggccagggaaccctggtcaccgtctcctcaggcggaggtggctctggaggaggaggttcaggaggtggtggatctggaggaggcggatcggggggtggaggaagtggcggcggtggtagtgaggtgcagctggtggagtctgggggaggcctggtcaagcctggggggtccctgagactctcctgtgcagcctctggattcaccttcagtaactataacatgaactgggtccgccaggctccagggaaggggctggagtgggtctcatcgattagtagtgctggtactcacatatactacgcagactcagtgaagggccgattcaccatctccagagacaacgccaagaactcactgtatctgcaaatgaacagcctgagagccgaggacacagctgtttattactgtgcgagagatcctcatagcactggctggtacaaggactttgactactggggccagggaaccctggtcaccgtctcctcagcggccgcacaccaccatcatcaccac

SEQ ID NO: 1768 - protein, 437 aa, Artificial
  Multispecific construct
EVQLVESGGGVVRPGGSLRLSCAASGFTFDDYAMSWVRQAPGKGLEWVSGITWNGGSTGYADSVKDRFTISRDNAKNSLYLQMNSLRAEDTALYYCVRDKYSYAWSYDDFDIWGQGTMVTVSSGGGGSGGGGSGGGGSGGGGSGGGGSGGGGSEVQLVESGGGVVQPGGSLRLSCAASGFTFSNYGMHWVRQAPGKGLEWVAVISNDGNTKTYADSVKGRFTISRDNSKNTLYLQMNSLRAEDTAVYYCAQDETTTVTASYYFDYWGQGTLVTVSSGGGGSGGGGSGGGGSGGGGSGGGGSGGGGSEVQLLESGGGLVKPGGSLRLSCAASGFTVSSYTMNWVRQAPGKGLEWVSSISSSGRYIYYADSVKGRFTISRDNAKNSLYLQMNSLRAEDTAVYYCARDPRMVGNPHEFDIWGQGTMVTVSSAAAHHHHHH

SEQ ID NO: 1769 - DNA, 1311 bp, Artificial
  Multispecific construct
gaggtgcagctggtggagtctgggggaggtgtggtacggcctggggggtccctgagactctcctgtgcagcctctggattcacctttgatgattatgccatgagttgggtccgccaagctccagggaaggggctggagtgggtctctggtattacttggaatggtggtagcacaggttatgcagactctgtgaaggaccgattcaccatctccagagacaacgccaagaactccctgtatctgcaaatgaacagtctgagagccgaggacacggccttgtattactgtgtgagagacaagtatagctatgcctggtcttatgatgattttgatatctggggccaagggacaatggtcaccgtctcctcaggtggtggcggttcaggcggaggtggctctggaggtggaggttcaggaggtggtggttctggcggcggtggatcgggtggaggtggtagtgaggtgcagctggtggagtctgggggaggcgttgtccagcctggggggtccctgagactctcctgtgcagcctctggattcaccttcagtaattatggcatgcactgggtccgccaggctccaggcaagggcctggagtgggtggcagtcatatcaaatgatggaaatactaaaacctatgcagattccgtgaagggtcgattcaccatctccagagacaattccaagaacacgttatatctgcaaatgaacagcctgagagctgaggacacggctgtgtattactgtgcgcaagatgagacgactacagtaactgcgtcgtattactttgactactggggccagggaaccctggtcaccgtctcctcaggcggaggtggctctggaggaggaggttcaggaggtggtggatctggaggaggcggatcggggggtggaggaagtggcggcggtggtagtgaggtgcagctgttggagtctgggggaggcctggtcaagccgggggggtccctgagactctcctgtgcagcctctggattcaccgtcagtagctataccatgaactgggtccgccaggctccggggaaggggctggagtgggtctcatccattagtagtagtggtcgttacatatactacgcagactcagtgaagggccgattcaccatctccagagacaacgccaagaactcattatatctgcaaatgaacagcctgagagccgaggacacagctgtatattattgtgcgagagatccccgtatggttgggaacccccatgaatttgatatctggggccaagggacaatggtcaccgtctcctcagcggccgcacaccaccatcatcaccac

SEQ ID NO: 1770 - protein, 441 aa, Artificial
  Multispecific construct
EVQLVESGGGLVQPGRSLRLSCAASGFTFDDYALHWVRQAPGKDLEWVSGISWNGGSYGYADSVKGRFTISRDNAKNSLYLQMNSLRAEDTALYYCVREKGPGLTGSTADYYGLDAWGQGTMVTVSSGGGGSGGGGSGGGGSGGGGSGGGGSGGGGSEVQLVESGGGLVKPGGSLRLSCAASGFTFSNYNMNWVRQAPGKGLEWVSSISSAGTHIYYADSVKGRFTISRDNAKNSLYLQMNSLRAEDTAVYYCARDPHSTGWYKDFDYWGQGTLVTVSSGGGGSGGGGSGGGGSGGGGSGGGGSGGGGSEVQLVESGGGVVQPGGSLRLSCAASGFTFSNYGMHWVRQAPGKGLEWVAVISNDGNTKTYADSVKGRFTISRDNSKNTLYLQMNSLRAEDTAVYYCAQDETTTVTASYYFDYWGQGTLVTVSSAAAHHHHHH

SEQ ID NO: 1771 - DNA, 1323 bp, Artificial
  Multispecific construct
gaggtgcagctggtggagtctgggggaggcttggtacagcctggcaggtccctgagactctcctgtgcagcctctggattcacctttgacgattatgccctacactgggtccggcaagctccagggaaggacctggagtgggtctcaggtattagttggaatggtggtagctacggctacgcggactctgtgaagggccgattcaccatctccagagacaacgccaagaactccctgtatctgcaaatgaacagtctgagagctgaggacacggccttgtattattgtgtaagagaaaaggggcccggcttaactggaagtacggccgattactacggtttggacgcctggggccaagggaccatggtcaccgtctcctcaggtggtggcggttcaggcggaggtggctctggaggtggaggttcaggaggtggtggttctggcggcggtggatcgggtggaggtggtagtgaggtgcagctggtggagtctgggggaggcctggtcaagcctggggggtccctgagactctcctgtgcagcctctggattcaccttcagtaactataacatgaactgggtccgccaggctccagggaaggggctggagtgggtctcatcgattagtagtgctggtactcacatatactacgcagactcagtgaagggccgattcaccatctccagagacaacgccaagaactcactgtatctgcaaatgaacagcctgagagccgaggacacagctgtttattactgtgcgagagatcctcatagcactggctggtacaaggactttgactactggggccagggaaccctggtcaccgtctcctcaggcggaggtggctctggaggaggaggttcaggaggtggtggatctggaggaggcggatcggggggtggaggaagtggcggcggtggtagtgaggtgcagctggtggagtctgggggaggcgttgtccagcctggggggtccctgagactctcctgtgcagcctctggattcaccttcagtaattatggcatgcactgggtccgccaggctccaggcaagggcctggagtgggtggcagtcatatcaaatgatggaaatactaaaacctatgcagattccgtgaagggccgattcaccatctccagagacaattccaagaacacgttatatctgcaaatgaacagcctgagagctgaggacacggctgtgtattactgtgcgcaagatgagacgactacagtaactgcgtcgtattactttgactactggggccagggaaccctggtcaccgtctcctcagcggccgcgcaccaccatcatcaccac

SEQ ID NO: 1772 - protein, 437 aa, Artificial
  Multispecific construct
EVQLVESGGGVVRPGGSLRLSCAASGFTFDDYAMSWVRQAPGKGLEWVSGITWNAGSTGYADSVKGRFTISRDNAKNSLYLQMNSLRAEDTALYYCVRDKYSYAWSYDDFDIWGQGTMVTVSSGGGGSGGGGSGGGGSGGGGSGGGGSGGGGSEVQLVESGGGLVKPGGSLRLSCAASGFTFSNYNMNWVRQAPGKGLEWVSSISSAGTHIYYADSVKGRFTISRDNAKNSLYLQMNSLRAEDTAVYYCARDPHSTGWYKDFDYWGQGTLVTVSSGGGGSGGGGSGGGGSGGGGSGGGGSGGGGSEVQLVESGGGVVQPGGSLRLSCAASGFTFSNYGMHWVRQAPGKGLEWVAVISNDGNTKTYADSVKGRFTISRDNSKNTLYLQMNSLRAEDTAVYYCAQDETTTVTASYYFDYWGQGTLVTVSSAAAHHHHHH

SEQ ID NO: 1773 - DNA, 1311 bp, Artificial
  Multispecific construct
gaggtgcagctggtggagtctgggggaggtgtggtacggcctggggggtccctgagactctcctgtgcagcctctggattcacctttgatgattatgccatgagttgggtccgccaagctccagggaaggggctggagtgggtctctggtattacttggaatgccggtagcacaggttatgcagactctgtgaagggccgattcaccatctccagagacaacgccaagaactccctgtatctgcaaatgaacagtctgagagccgaggacacggccttgtattactgtgtgagagacaagtatagctatgcctggtcttatgatgattttgatatctggggccaagggacaatggtcaccgtctcctcaggtggtggcggttcaggcggaggtggctctggaggtggaggttcaggaggtggtggttctggcggcggtggatcgggtggaggtggtagtgaggtgcagctggtggagtctgggggaggcctggtcaagcctggggggtccctgagactctcctgtgcagcctctggattcaccttcagtaactataacatgaactgggtccgccaggctccagggaaggggctggagtgggtctcatcgattagtagtgctggtactcacatatactacgcagactcagtgaagggccgattcaccatctccagagacaacgccaagaactcactgtatctgcaaatgaacagcctgagagccgaggacacagctgtttattactgtgcgagagatcctcatagcactggctggtacaaggactttgactactggggccagggaaccctggtcaccgtctcctcaggcggaggtggctctggaggaggaggttcaggaggtggtggatctggaggaggcggatcggggggtggaggaagtggcggcggtggtagtgaggtgcagctggtggagtctgggggaggcgttgtccagcctggggggtccctgagactctcctgtgcagcctctggattcaccttcagtaattatggcatgcactgggtccgccaggctccaggcaagggcctggagtgggtggcagtcatatcaaatgatggaaatactaaaacctatgcagattccgtgaagggccgattcaccatctccagagacaattccaagaacacgttatatctgcaaatgaacagcctgagagctgaggacacggctgtgtattactgtgcgcaagatgagacgactacagtaactgcgtcgtattactttgactactggggccagggaaccctggtcaccgtctcctcagcggccgcacaccaccatcatcaccac

SEQ ID NO: 1774 - protein, 441 aa, Artificial
  Multispecific construct
EVQLVESGGGLVQPGGSLRLSCAASGFTLSNYWMNWVRQAPGKGLEWVANINQDGSERYYVDSVKGRFTISRDNAKNSLYLQMNSLRAEDTAVYYCARGGEGYGVDHYGLDVSGQGTTVTVSSGGGGSGGGGSGGGGSGGGGSGGGGSGGGGSEVQLVESGGGLVQPGRSLRLSCAASGFTFDDYALHWVRQAPGKDLEWVSGISWNGGSYGYADSVKGRFTISRDNAKNSLYLQMNSLRAEDTALYYCVREKGPGLTGSTADYYGLDAWGQGTMVTVSSGGGGSGGGGSGGGGSGGGGSGGGGSGGGGSEVQLVESGGGLVKPGGSLRLSCAASGFTFSNYNMNWVRQAPGKGLEWVSSISSAGTHIYYADSVKGRFTISRDNAKNSLYLQMNSLRAEDTAVYYCARDPHSTGWYKDFDYWGQGTLVTVSSAAAHHHHHH

SEQ ID NO: 1775 - DNA, 1323 bp, Artificial
  Multispecific construct
gaggtgcagctggtggagtctggaggtggtttagttcagccggggggctcgcttcgcctgtcgtgcgccgcctcgggattcacattatcaaactactggatgaattgggtccgccaggctccgggcaaaggtcttgagtgggtggcgaacattaatcaggacgggagcgagcgttattacgttgattcggtaaaaggacgtttcactatcagtcgtgacaacgctaaaaattccttgtacttacagatgaactcacttcgtgctgaggacaccgcagtgtactactgtgctcgcggtggtgaaggatacggcgtcgatcactacggccttgatgtatcaggacaggggactacggtcaccgtctcctcaggtggtggcggttcaggcggaggtggctctggaggtggaggttcaggaggtggtggttctggcggcggtggatcgggtggaggtggtagtgaggtgcagctggtggagtctgggggaggcttggtacagcctggcaggtccctgagactctcctgtgcagcctctggattcacctttgacgattatgccctacactgggtccggcaagctccagggaaggacctggagtgggtctcaggtattagttggaatggtggtagctacggctacgcggactctgtgaagggccgattcaccatctccagagacaacgccaagaactccctgtatctgcaaatgaacagtctgagagctgaggacacggccttgtattattgtgtaagagaaaaggggcccggcttaactggaagtacggccgattactacggtttggacgcctggggccaagggaccatggtcaccgtctcctcaggcggaggtggctctggaggaggaggttcaggaggtggtggatctggaggaggcggatcggggggtggaggaagtggcggcggtggtagtgaggtgcagctggtggagtctgggggaggcctggtcaagcctggggggtccctgagactctcctgtgcagcctctggattcaccttcagtaactataacatgaactgggtccgccaggctccagggaaggggctggagtgggtctcatcgattagtagtgctggtactcacatatactacgcagactcagtgaagggccgattcaccatctccagagacaacgccaagaactcactgtatctgcaaatgaacagcctgagagccgaggacacagctgtttattactgtgcgagagatcctcatagcactggctggtacaaggactttgactactggggccagggaaccctggtcaccgtctcctcagcggccgcacaccaccatcatcaccac

SEQ ID NO: 1776 - protein, 437 aa, Artificial
  Multispecific construct
EVQLVESGGGLVQPGGSLRLSCAASGFTLSNYWMNWVRQAPGKGLEWVANINQDGSERYYVDSVKGRFTISRDNAKNSLYLQMNSLRAEDTAVYYCARGGEGYGVDHYGLDVSGQGTTVTVSSGGGGSGGGGSGGGGSGGGGSGGGGSGGGGSEVQLVESGGGVVRPGGSLRLSCAASGFTFDDYAMSWVRQAPGKGLEWVSGITWNAGSTGYADSVKGRFTISRDNAKNSLYLQMNSLRAEDTALYYCVRDKYSYAWSYDDFDIWGQGTMVTVSSGGGGSGGGGSGGGGSGGGGSGGGGSGGGGSEVQLVESGGGLVKPGGSLRLSCAASGFTFSNYNMNWVRQAPGKGLEWVSSISSAGTHIYYADSVKGRFTISRDNAKNSLYLQMNSLRAEDTAVYYCARDPHSTGWYKDFDYWGQGTLVTVSSAAAHHHHHH

SEQ ID NO: 1777 - DNA, 1311 bp, Artificial
  Multispecific construct
gaggtgcagctggtggagtctggaggtggtttagttcagccggggggctcgcttcgcctgtcgtgcgccgcctcgggattcacattatcaaactactggatgaattgggtccgccaggctccgggcaaaggtcttgagtgggtggcgaacattaatcaggacgggagcgagcgttattacgttgattcggtaaaaggacgtttcactatcagtcgtgacaacgctaaaaattccttgtacttacagatgaactcacttcgtgctgaggacaccgcagtgtactactgtgctcgcggtggtgaaggatacggcgtcgatcactacggccttgatgtatcaggacaggggactacggtcaccgtctcctcaggtggtggcggttcaggcggaggtggctctggaggtggaggttcaggaggtggtggttctggcggcggtggatcgggtggaggtggtagtgaggtgcagctggtggagtctgggggaggtgtggtacggcctggggggtccctgagactctcctgtgcagcctctggattcacctttgatgattatgccatgagttgggtccgccaagctccagggaaggggctggagtgggtctctggtattacttggaatgccggtagcacaggttatgcagactctgtgaagggccgattcaccatctccagagacaacgccaagaactccctgtatctgcaaatgaacagtctgagagccgaggacacggccttgtattactgtgtgagagacaagtatagctatgcctggtcttatgatgattttgatatctggggccaagggacaatggtcaccgtctcctcaggcggaggtggctctggaggaggaggttcaggaggtggtggatctggaggaggcggatcggggggtggaggaagtggcggcggtggtagtgaggtgcagctggtggagtctgggggaggcctggtcaagcctggggggtccctgagactctcctgtgcagcctctggattcaccttcagtaactataacatgaactgggtccgccaggctccagggaaggggctggagtgggtctcatcgattagtagtgctggtactcacatatactacgcagactcagtgaagggccgattcaccatctccagagacaacgccaagaactcactgtatctgcaaatgaacagcctgagagccgaggacacagctgtttattactgtgcgagagatcctcatagcactggctggtacaaggactttgactactggggccagggaaccctggtcaccgtctcctcagcggccgcacaccaccatcatcaccac

SEQ ID NO: 1778 - protein, 437 aa, Artificial
  Multispecific construct
EVQLVESGGGVVQPGGSLRLSCAASGFTFSNYGMHWVRQAPGKGLEWVAVISNDGNTKTYADSVKGRFTISRDNSKNTLYLQMNSLRAEDTAVYYCAQDETTTVTASYYFDYWGQGTLVTVSSGGGGSGGGGSGGGGSGGGGSGGGGSGGGGSEVQLVESGGGVVRPGGSLRLSCAASGFTFDDYAMSWVRQAPGKGLEWVSGITWNAGSTGYADSVKGRFTISRDNAKNSLYLQMNSLRAEDTALYYCVRDKYSYAWSYDDFDIWGQGTMVTVSSGGGGSGGGGSGGGGSGGGGSGGGGSGGGGSEVQLVESGGGLVKPGGSLRLSCAASGFTFSNYNMNWVRQAPGKGLEWVSSISSAGTHIYYADSVKGRFTISRDNAKNSLYLQMNSLRAEDTAVYYCARDPHSTGWYKDFDYWGQGTLVTVSSAAAHHHHHH

SEQ ID NO: 1779 - DNA, 1311 bp, Artificial
  Multispecific construct
gaggtgcagctggtggagtctgggggaggcgttgtccagcctggggggtccctgagactctcctgtgcagcctctggattcaccttcagtaattatggcatgcactgggtccgccaggctccaggcaagggcctggagtgggtggcagtcatatcaaatgatggaaatactaaaacctatgcagattccgtgaagggccgattcaccatctccagagacaattccaagaacacgttatatctgcaaatgaacagcctgagagctgaggacacggctgtgtattactgtgcgcaagatgagacgactacagtaactgcgtcgtattactttgactactggggccagggaaccctggtcaccgtctcctcaggtggtggcggttcaggcggaggtggctctggaggtggaggttcaggaggtggtggttctggcggcggtggatcgggtggaggtggtagtgaggtgcagctggtggagtctgggggaggtgtggtacggcctggggggtccctgagactctcctgtgcagcctctggattcacctttgatgattatgccatgagttgggtccgccaagctccagggaaggggctggagtgggtctctggtattacttggaatgccggtagcacaggttatgcagactctgtgaagggccgattcaccatctccagagacaacgccaagaactccctgtatctgcaaatgaacagtctgagagccgaggacacggccttgtattactgtgtgagagacaagtatagctatgcctggtcttatgatgattttgatatctggggccaagggacaatggtcaccgtctcctcaggcggaggtggctctggaggaggaggttcaggaggtggtggatctggaggaggcggatcggggggtggaggaagtggcggcggtggtagtgaggtgcagctggtggagtctgggggaggcctggtcaagcctggggggtccctgagactctcctgtgcagcctctggattcaccttcagtaactataacatgaactgggtccgccaggctccagggaaggggctggagtgggtctcatcgattagtagtgctggtactcacatatactacgcagactcagtgaagggccgattcaccatctccagagacaacgccaagaactcactgtatctgcaaatgaacagcctgagagccgaggacacagctgtttattactgtgcgagagatcctcatagcactggctggtacaaggactttgactactggggccagggaaccctggtcaccgtctcctcagcggccgcacaccaccatcatcaccac

SEQ ID NO: 1780 - protein, 441 aa, Artificial
  Multispecific construct
EVQLVESGGGLVQPGGSLRLSCAASGFTLSNYWMNWVRQAPGKGLEWVANINQDGSERYYVDSVKGRFTISRDNAKNSLYLQMNSLRAEDTAVYYCARGGEGYGVDHYGLDVSGQGTTVTVSSGGGGSGGGGSGGGGSGGGGSGGGGSGGGGSEVQLVESGGGLVKPGGSLRLSCAASGFTFSNYNMNWVRQAPGKGLEWVSSISSAGTHIYYADSVKGRFTISRDNAKNSLYLQMNSLRAEDTAVYYCARDPHSTGWYKDFDYWGQGTLVTVSSGGGGSGGGGSGGGGSGGGGSGGGGSGGGGSEVQLVESGGGLVQPGRSLRLSCAASGFTFDDYALHWVRQAPGKDLEWVSGISWNGGSYGYADSVKGRFTISRDNAKNSLYLQMNSLRAEDTALYYCVREKGPGLTGSTADYYGLDAWGQGTMVTVSSAAAHHHHHH

SEQ ID NO: 1781 - DNA, 1323 bp, Artificial
  Multispecific construct
gaggtgcagctggtggagtctggaggtggtttagttcagccggggggctcgcttcgcctgtcgtgcgccgcctcgggattcacattatcaaactactggatgaattgggtccgccaggctccgggcaaaggtcttgagtgggtggcgaacattaatcaggacgggagcgagcgttattacgttgattcggtaaaaggacgtttcactatcagtcgtgacaacgctaaaaattccttgtacttacagatgaactcacttcgtgctgaggacaccgcagtgtactactgtgctcgcggtggtgaaggatacggcgtcgatcactacggccttgatgtatcaggacaggggactacggtcaccgtctcctcaggtggtggcggttcaggcggaggtggctctggaggtggaggttcaggaggtggtggttctggcggcggtggatcgggtggaggtggtagtgaggtgcagctggtggagtctgggggaggcctggtcaagcctggggggtccctgagactctcctgtgcagcctctggattcaccttcagtaactataacatgaactgggtccgccaggctccagggaaggggctggagtgggtctcatcgattagtagtgctggtactcacatatactacgcagactcagtgaagggccgattcaccatctccagagacaacgccaagaactcactgtatctgcaaatgaacagcctgagagccgaggacacagctgtttattactgtgcgagagatcctcatagcactggctggtacaaggactttgactactggggccagggaaccctggtcaccgtctcctcaggcggaggtggctctggaggaggaggttcaggaggtggtggatctggaggaggcggatcggggggtggaggaagtggcggcggtggtagtgaggtgcagctggtggagtctgggggaggcttggtacagcctggcaggtccctgagactctcctgtgcagcctctggattcacctttgacgattatgccctacactgggtccggcaagctccagggaaggacctggagtgggtctcaggtattagttggaatggtggtagctacggctacgcggactctgtgaagggccgattcaccatctccagagacaacgccaagaactccctgtatctgcaaatgaacagtctgagagctgaggacacggccttgtattattgtgtaagagaaaaggggcccggcttaactggaagtacggccgattactacggtttggacgcctggggccaagggaccatggtcaccgtctcctcagcggccgcacaccaccatcatcaccac

SEQ ID NO: 1782 - protein, 437 aa, Artificial
  Multispecific construct
EVQLVESGGGLVQPGGSLRLSCAASGFTLSNYWMNWVRQAPGKGLEWVANINQDGSERYYVDSVKGRFTISRDNAKNSLYLQMNSLRAEDTAVYYCARGGEGYGVDHYGLDVSGQGTTVTVSSGGGGSGGGGSGGGGSGGGGSGGGGSGGGGSEVQLVESGGGLVKPGGSLRLSCAASGFTFSNYNMNWVRQAPGKGLEWVSSISSAGTHIYYADSVKGRFTISRDNAKNSLYLQMNSLRAEDTAVYYCARDPHSTGWYKDFDYWGQGTLVTVSSGGGGSGGGGSGGGGSGGGGSGGGGSGGGGSEVQLVESGGGVVRPGGSLRLSCAASGFTFDDYAMSWVRQAPGKGLEWVSGITWNAGSTGYADSVKGRFTISRDNAKNSLYLQMNSLRAEDTALYYCVRDKYSYAWSYDDFDIWGQGTMVTVSSAAAHHHHHH

SEQ ID NO: 1783 - DNA, 1311 bp, Artificial
  Multispecific construct
gaggtgcagctggtggagtctggaggtggtttagttcagccggggggctcgcttcgcctgtcgtgcgccgcctcgggattcacattatcaaactactggatgaattgggtccgccaggctccgggcaaaggtcttgagtgggtggcgaacattaatcaggacgggagcgagcgttattacgttgattcggtaaaaggacgtttcactatcagtcgtgacaacgctaaaaattccttgtacttacagatgaactcacttcgtgctgaggacaccgcagtgtactactgtgctcgcggtggtgaaggatacggcgtcgatcactacggccttgatgtatcaggacaggggactacggtcaccgtctcctcaggtggtggcggttcaggcggaggtggctctggaggtggaggttcaggaggtggtggttctggcggcggtggatcgggtggaggtggtagtgaggtgcagctggtggagtctgggggaggcctggtcaagcctggggggtccctgagactctcctgtgcagcctctggattcaccttcagtaactataacatgaactgggtccgccaggctccagggaaggggctggagtgggtctcatcgattagtagtgctggtactcacatatactacgcagactcagtgaagggccgattcaccatctccagagacaacgccaagaactcactgtatctgcaaatgaacagcctgagagccgaggacacagctgtttattactgtgcgagagatcctcatagcactggctggtacaaggactttgactactggggccagggaaccctggtcaccgtctcctcaggcggaggtggctctggaggaggaggttcaggaggtggtggatctggaggaggcggatcggggggtggaggaagtggcggcggtggtagtgaggtgcagctggtggagtctgggggaggtgtggtacggcctggggggtccctgagactctcctgtgcagcctctggattcacctttgatgattatgccatgagttgggtccgccaagctccagggaaggggctggagtgggtctctggtattacttggaatgccggtagcacaggttatgcagactctgtgaagggccgattcaccatctccagagacaacgccaagaactccctgtatctgcaaatgaacagtctgagagccgaggacacggccttgtattactgtgtgagagacaagtatagctatgcctggtcttatgatgattttgatatctggggccaagggacaatggtcaccgtctcctcagcggccgcacaccaccatcatcaccac

SEQ ID NO: 1784 - protein, 441 aa, Artificial
  Multispecific construct
EVQLVESGGGVVQPGGSLRLSCAASGFTFSNYGMHWVRQAPGKGLEWVAVISNDGNTKTYADSVKGRFTISRDNSKNTLYLQMNSLRAEDTAVYYCAQDETTTVTASYYFDYWGQGTLVTVSSGGGGSGGGGSGGGGSGGGGSGGGGSGGGGSEVQLVESGGGLVKPGGSLRLSCAASGFTFSNYNMNWVRQAPGKGLEWVSSISSAGTHIYYADSVKGRFTISRDNAKNSLYLQMNSLRAEDTAVYYCARDPHSTGWYKDFDYWGQGTLVTVSSGGGGSGGGGSGGGGSGGGGSGGGGSGGGGSEVQLVESGGGLVQPGRSLRLSCAASGFTFDDYALHWVRQAPGKDLEWVSGISWNGGSYGYADSVKGRFTISRDNAKNSLYLQMNSLRAEDTALYYCVREKGPGLTGSTADYYGLDAWGQGTMVTVSSAAAHHHHHH

SEQ ID NO: 1785 - DNA, 1323 bp, Artificial
  Multispecific construct
gaggtgcagctggtggagtctgggggaggcgttgtccagcctggggggtccctgagactctcctgtgcagcctctggattcaccttcagtaattatggcatgcactgggtccgccaggctccaggcaagggcctggagtgggtggcagtcatatcaaatgatggaaatactaaaacctatgcagattccgtgaagggccgattcaccatctccagagacaattccaagaacacgttatatctgcaaatgaacagcctgagagctgaggacacggctgtgtattactgtgcgcaagatgagacgactacagtaactgcgtcgtattactttgactactggggccagggaaccctggtcaccgtctcctcaggtggtggcggttcaggcggaggtggctctggaggtggaggttcaggtggtggtggttctggcggcggtggatcgggtggaggtggtagtgaggtgcagctggtggagtctgggggaggcctggtcaagcctggggggtccctgagactctcctgtgcagcctctggattcaccttcagtaactataacatgaactgggtccgccaggctccagggaaggggctggagtgggtctcatcgattagtagtgctggtactcacatatactacgcagactcagtgaagggccgattcaccatctccagagacaacgccaagaactcactgtatctgcaaatgaacagcctgagagccgaggacacagctgtttattactgtgcgagagatcctcatagcactggctggtacaaggactttgactactggggccagggaaccctggtcaccgtctcctcaggcggaggtggctctggaggaggaggttcaggaggtggtggatctggaggaggcggatcggggggtggaggaagtggcggcggtggtagtgaggtgcagctggtggagtctgggggaggcttggtacagcctggcaggtccctgagactctcctgtgcagcctctggattcacctttgacgattatgccctacactgggtccggcaagctccagggaaggacctggagtgggtctcaggtattagttggaatggtggtagctacggctacgcggactctgtgaagggccgattcaccatctccagagacaacgccaagaactccctgtatctgcaaatgaacagtctgagagctgaggacacggccttgtattattgtgtaagagaaaaggggcccggcttaactggaagtacggccgattactacggtttggacgcctggggccaagggaccatggtcaccgtctcctcagcggccgcacaccaccatcatcaccac

SEQ ID NO: 1786 - protein, 437 aa, Artificial
  Multispecific construct
EVQLVESGGGVVQPGGSLRLSCAASGFTFSNYGMHWVRQAPGKGLEWVAVISNDGNTKTYADSVKGRFTISRDNSKNTLYLQMNSLRAEDTAVYYCAQDETTTVTASYYFDYWGQGTLVTVSSGGGGSGGGGSGGGGSGGGGSGGGGSGGGGSEVQLVESGGGLVKPGGSLRLSCAASGFTFSNYNMNWVRQAPGKGLEWVSSISSAGTHIYYADSVKGRFTISRDNAKNSLYLQMNSLRAEDTAVYYCARDPHSTGWYKDFDYWGQGTLVTVSSGGGGSGGGGSGGGGSGGGGSGGGGSGGGGSEVQLVESGGGVVRPGGSLRLSCAASGFTFDDYAMSWVRQAPGKGLEWVSGITWNAGSTGYADSVKGRFTISRDNAKNSLYLQMNSLRAEDTALYYCVRDKYSYAWSYDDFDIWGQGTMVTVSSAAAHHHHHH

SEQ ID NO: 1787 - DNA, 1311 bp, Artificial
  Multispecific construct
gaggtgcagctggtggagtctgggggaggcgttgtccagcctggggggtccctgagactctcctgtgcagcctctggattcaccttcagtaattatggcatgcactgggtccgccaggctccaggcaagggcctggagtgggtggcagtcatatcaaatgatggaaatactaaaacctatgcagattccgtgaagggccgattcaccatctccagagacaattccaagaacacgttatatctgcaaatgaacagcctgagagctgaggacacggctgtgtattactgtgcgcaagatgagacgactacagtaactgcgtcgtattactttgactactggggccagggaaccctggtcaccgtctcctcaggtggtggcggttcaggcggaggtggctctggaggtggaggttcaggaggtggtggttctggcggcggtggatcgggtggaggtggtagtgaggtgcagctggtggagtctgggggaggcctggtcaagcctggggggtccctgagactctcctgtgcagcctctggattcaccttcagtaactataacatgaactgggtccgccaggctccagggaaggggctggagtgggtctcatcgattagtagtgctggtactcacatatactacgcagactcagtgaagggccgattcaccatctccagagacaacgccaagaactcactgtatctgcaaatgaacagcctgagagccgaggacacagctgtttattactgtgcgagagatcctcatagcactggctggtacaaggactttgactactggggccagggaaccctggtcaccgtctcctcaggcggaggtggctctggaggaggaggttcaggaggtggtggatctggaggaggcggatcggggggtggaggaagtggcggcggtggtagtgaggtgcagctggtggagtctgggggaggtgtggtacggcctggggggtccctgagactctcctgtgcagcctctggattcacctttgatgattatgccatgagttgggtccgccaagctccagggaaggggctggagtgggtctctggtattacttggaatgccggtagcacaggttatgcagactctgtgaagggccgattcaccatctccagagacaacgccaagaactccctgtatctgcaaatgaacagtctgagagccgaggacacggccttgtattactgtgtgagagacaagtatagctatgcctggtcttatgatgattttgatatctggggccaagggacaatggtcaccgtctcctcagcggccgcacaccaccatcatcaccac

SEQ ID NO: 1788 - protein, 441 aa, Artificial
  Multispecific construct
EVQLVESGGGLVQPGRSLRLSCAASGFTFDDYALHWVRQAPGKDLEWVSGISWNGGSYGYADSVKGRFTISRDNAKNSLYLQMNSLRAEDTALYYCVREKGPGLTGSTADYYGLDAWGQGTMVTVSSGGGGSGGGGSGGGGSGGGGSGGGGSGGGGSEVQLLESGGGLVKPGGSLRLSCAASGFTVSSYTMNWVRQAPGKGLEWVSSISSSGRYIYYADSVKGRFTISRDNAKNSLYLQMNSLRAEDTAVYYCARDPRMVGNPHEFDIWGQGTMVTVSSGGGGSGGGGSGGGGSGGGGSGGGGSGGGGSEVQLVESGGGVVQPGGSLRLSCAASGFTFSNYGMHWVRQAPGKGLEWVAVISNDGNTKTYADSVKGRFTISRDNSKNTLYLQMNSLRAEDTAVYYCAQDETTTVTASYYFDYWGQGTLVTVSSAAAHHHHHH

SEQ ID NO: 1789 - DNA, 1323 bp, Artificial
  Multispecific construct
gaggtgcagctggtggagtctgggggaggcttggtacagcctggcaggtccctgagactctcctgtgcagcctctggattcacctttgacgattatgccctacactgggtccggcaagctccagggaaggacctggagtgggtctcaggtattagttggaatggtggtagctacggctacgcggactctgtgaagggccgattcaccatctccagagacaacgccaagaactccctgtatctgcaaatgaacagtctgagagctgaggacacggccttgtattattgtgtaagagaaaaggggcccggcttaactggaagtacggccgattactacggtttggacgcctggggccaagggaccatggtcaccgtctcctcaggtggtggcggttcaggcggaggtggctctggaggtggaggttcaggaggtggtggttctggcggcggtggatcgggtggaggtggtagtgaggtgcagctgttggagtctgggggaggcctggtcaagccgggggggtccctgagactctcctgtgcagcctctggattcaccgtcagtagctataccatgaactgggtccgccaggctccggggaaggggctggagtgggtctcatccattagtagtagtggtcgttacatatactacgcagactcagtgaagggccgattcaccatctccagagacaacgccaagaactcattatatctgcaaatgaacagcctgagagccgaggacacagctgtatattattgtgcgagagatccccgtatggttgggaacccccatgaatttgatatctggggccaagggacaatggtcaccgtctcctcaggcggaggtggctctggaggaggaggttcaggaggtggtggatctggaggaggcggatcggggggtggaggaagtggcggcggtggtagtgaggtgcagctggtggagtctgggggaggcgttgtccagcctggggggtccctgagactctcctgtgcagcctctggattcaccttcagtaattatggcatgcactgggtccgccaggctccaggcaagggcctggagtgggtggcagtcatatcaaatgatggaaatactaaaacctatgcagattccgtgaagggccgattcaccatctccagagacaattccaagaacacgttatatctgcaaatgaacagcctgagagctgaggacacggctgtgtattactgtgcgcaagatgagacgactacagtaactgcgtcgtattactttgactactggggccagggaaccctggtcaccgtctcctcagcggccgcacaccaccatcatcaccac

SEQ ID NO: 1790 - protein, 442 aa, Artificial
  Multispecific construct
EVQLVESGGGLVQPGRSLRLSCAASGFTFDDYALHWVRQAPGKDLEWVSGISWNGGSYGYADSVKGRFTISRDNAKNSLYLQMNSLRAEDTALYYCVREKGPGLTGSTADYYGLDAWGQGTMVTVSSGGGGSGGGGSGGGGSGGGGSGGGGSGGGGSEVQLVESGGGLVQPGRSLRLSCAASGFTFHHYAMHWVRQAPGKGLEWVSGISWNGNKITYADSVKGRFTISRDNAKNSLYLQMNSLRAEDTALYYCVRDSSLFIVGAPTFEHWGRGTLVTVSSGGGGSGGGGSGGGGSGGGGSGGGGSGGGGSEVQLVESGGGVVQPGGSLRLSCAASGFTFSNYGMHWVRQAPGKGLEWVAVISNDGNTKTYADSVKGRFTISRDNSKNTLYLQMNSLRAEDTAVYYCAQDETTTVTASYYFDYWGQGTLVTVSSAAAHHHHHH

SEQ ID NO: 1791 - DNA, 1326 bp, Artificial
  Multispecific construct
gaggtgcagctggtggagtctgggggaggcttggtacagcctggcaggtccctgagactctcctgtgcagcctctggattcacctttgacgattatgccctacactgggtccggcaagctccagggaaggacctggagtgggtctcaggtattagttggaatggtggtagctacggctacgcggactctgtgaagggccgattcaccatctccagagacaacgccaagaactccctgtatctgcaaatgaacagtctgagagctgaggacacggccttgtattattgtgtaagagaaaaggggcccggcttaactggaagtacggccgattactacggtttggacgcctggggccaagggaccatggtcaccgtctcctcaggtggtggcggttcaggcggaggtggctctggaggtggaggttcaggtggtggtggttctggcggcggtggatcgggtggaggtggtagtgaggtgcaactggtcgagtctggtggtggtttggtgcaacctggtagaagcttgcgtttgagttgtgccgcttccggcttcactttccatcattatgctatgcactgggttcgtcaagctcccggaaaaggtttggagtgggtttccggaatttcctggaatggcaataagattacgtacgctgattcagtgaaaggaaggtttacaatcagtagagataatgctaaaaactcattgtatctacaaatgaacagcctaagagcagaagataccgctctgtactactgtgttagagatagctcgttattcattgtaggtgcaccaacttttgaacattggggtcggggtactcttgtgactgtctcatccggcggaggtggctctggaggaggaggttcaggaggtggtggatctggaggaggcggatcggggggtggaggaagtggcggcggtggtagtgaggtgcagctggtggagtctgggggaggcgttgtccagcctggggggtccctgagactctcctgtgcagcctctggattcaccttcagtaattatggcatgcactgggtccgccaggctccaggcaagggcctggagtgggtggcagtcatatcaaatgatggaaatactaaaacctatgcagattccgtgaagggccgattcaccatctccagagacaattccaagaacacgttatatctgcaaatgaacagcctgagagctgaggacacggctgtgtattactgtgcgcaagatgagacgactacagtaactgcgtcgtattactttgactactggggccagggaaccctggtcaccgtctcctcagcggccgcacaccaccatcatcaccac

SEQ ID NO: 1792 - protein, 437 aa, Artificial
  Multispecific construct
EVQLVESGGGVVRPGGSLRLSCAASGFTFDDYAMSWVRQAPGKGLEWVSGITWNGGSTGYADSVKDRFTISRDNAKNSLYLQMNSLRAEDTALYYCVRDKYSYAWSYDDFDIWGQGTMVTVSSGGGGSGGGGSGGGGSGGGGSGGGGSGGGGSEVQLVESGGGLVKPGGSLRLSCAASGFTFSNYNMNWVRQAPGKGLEWVSSISSAGTHIYYADSVKGRFTISRDNAKNSLYLQMNSLRAEDTAVYYCARDPHSTGWYKDFDYWGQGTLVTVSSGGGGSGGGGSGGGGSGGGGSGGGGSGGGGSEVQLVESGGGVVQPGGSLRLSCAASGFTFSNYGMHWVRQAPGKGLEWVAVISNDGNTKTYADSVKGRFTISRDNSKNTLYLQMNSLRAEDTAVYYCAQDETTTVTASYYFDYWGQGTLVTVSSAAAHHHHHH

SEQ ID NO: 1793 - DNA, 1311 bp, Artificial
  Multispecific construct
gaggtgcagctggtggagtctgggggaggtgtggtacggcctggggggtccctgagactctcctgtgcagcctctggattcacctttgatgattatgccatgagttgggtccgccaagctccagggaaggggctggagtgggtctctggtattacttggaatggtggtagcacaggttatgcagactctgtgaaggaccgattcaccatctccagagacaacgccaagaactccctgtatctgcaaatgaacagtctgagagccgaggacacggccttgtattactgtgtgagagacaagtatagctatgcctggtcttatgatgattttgatatctggggccaagggacaatggtcaccgtctcctcaggtggtggcggttcaggcggaggtggctctggaggtggaggttcaggaggtggtggttctggcggcggtggatcgggtggaggtggtagtgaggtgcagctggtggagtctgggggaggcctggtcaagcctggggggtccctgagactctcctgtgcagcctctggattcaccttcagtaactataacatgaactgggtccgccaggctccagggaaggggctggagtgggtctcatcgattagtagtgctggtactcacatatactacgcagactcagtgaagggccgattcaccatctccagagacaacgccaagaactcactgtatctgcaaatgaacagcctgagagccgaggacacagctgtttattactgtgcgagagatcctcatagcactggctggtacaaggactttgactactggggccagggaaccctggtcaccgtctcctcaggcggaggtggctctggaggaggaggttcaggaggtggtggatctggaggaggcggatcggggggtggaggaagtggcggcggtggtagtgaggtgcagctggtggagtctgggggaggcgttgtccagcctggggggtccctgagactctcctgtgcagcctctggattcaccttcagtaattatggcatgcactgggtccgccaggctccaggcaagggcctggagtgggtggcagtcatatcaaatgatggaaatactaaaacctatgcagattccgtgaagggccgattcaccatctccagagacaattccaagaacacgttatatctgcaaatgaacagcctgagagctgaggacacggctgtgtattactgtgcgcaagatgagacgactacagtaactgcgtcgtattactttgactactggggccagggaaccctggtcaccgtctcctcagcggccgcacaccaccatcatcaccac

SEQ ID NO: 1794 - protein, 437 aa, Artificial
  Multispecific construct
EVQLVESGGGVVRPGGSLRLSCAASGFTFDDYAMSWVRQAPGKGLEWVSGITWNGGSTGYADSVKDRFTISRDNAKNSLYLQMNSLRAEDTALYYCVRDKYSYAWSYDDFDIWGQGTMVTVSSGGGGSGGGGSGGGGSGGGGSGGGGSGGGGSEVQLLESGGGLVKPGGSLRLSCAASGFTVSSYTMNWVRQAPGKGLEWVSSISSSGRYIYYADSVKGRFTISRDNAKNSLYLQMNSLRAEDTAVYYCARDPRMVGNPHEFDIWGQGTMVTVSSGGGGSGGGGSGGGGSGGGGSGGGGSGGGGSEVQLVESGGGVVQPGGSLRLSCAASGFTFSNYGMHWVRQAPGKGLEWVAVISNDGNTKTYADSVKGRFTISRDNSKNTLYLQMNSLRAEDTAVYYCAQDETTTVTASYYFDYWGQGTLVTVSSAAAHHHHHH

SEQ ID NO: 1795 - DNA, 1311 bp, Artificial
  Multispecific construct
gaggtgcagctggtggagtctgggggaggtgtggtacggcctggggggtccctgagactctcctgtgcagcctctggattcacctttgatgattatgccatgagttgggtccgccaagctccagggaaggggctggagtgggtctctggtattacttggaatggtggtagcacaggttatgcagactctgtgaaggaccgattcaccatctccagagacaacgccaagaactccctgtatctgcaaatgaacagtctgagagccgaggacacggccttgtattactgtgtgagagacaagtatagctatgcctggtcttatgatgattttgatatctggggccaagggacaatggtcaccgtctcctcaggtggtggcggttcaggcggaggtggctctggaggtggaggttcaggaggtggtggttctggcggcggtggatcgggtggaggtggtagtgaggtgcagctgttggagtctgggggaggcctggtcaagccgggggggtccctgagactctcctgtgcagcctctggattcaccgtcagtagctataccatgaactgggtccgccaggctccggggaaggggctggagtgggtctcatccattagtagtagtggtcgttacatatactacgcagactcagtgaagggccgattcaccatctccagagacaacgccaagaactcattatatctgcaaatgaacagcctgagagccgaggacacagctgtatattattgtgcgagagatccccgtatggttgggaacccccatgaatttgatatctggggccaagggacaatggtcaccgtctcctcaggtggtggcggttcaggcggaggtggctctggaggtggaggttcaggaggtggtggttctggcggcggtggatcgggtggaggtggtagtgaggtgcagctggtggagtctgggggaggcgttgtccagcctggggggtccctgagactctcctgtgcagcctctggattcaccttcagtaattatggcatgcactgggtccgccaggctccaggcaagggcctggagtgggtggcagtcatatcaaatgatggaaatactaaaacctatgcagattccgtgaagggccgattcaccatctccagagacaattccaagaacacgttatatctgcaaatgaacagcctgagagctgaggacacggctgtgtattactgtgcgcaagatgagacgactacagtaactgcgtcgtattactttgactactggggccagggaaccctggtcaccgtctcctcagcggccgcacaccaccatcatcaccac

SEQ ID NO: 1796 - protein, 438 aa, Artificial
  Multispecific construct
EVQLVESGGGVVRPGGSLRLSCAASGFTFDDYAMSWVRQAPGKGLEWVSGITWNGGSTGYADSVKDRFTISRDNAKNSLYLQMNSLRAEDTALYYCVRDKYSYAWSYDDFDIWGQGTMVTVSSGGGGSGGGGSGGGGSGGGGSGGGGSGGGGSEVQLVESGGGLVQPGRSLRLSCAASGFTFHHYAMHWVRQAPGKGLEWVSGISWNGNKITYADSVKGRFTISRDNAKNSLYLQMNSLRAEDTALYYCVRDSSLFIVGAPTFEHWGRGTLVTVSSGGGGSGGGGSGGGGSGGGGSGGGGSGGGGSEVQLVESGGGVVQPGGSLRLSCAASGFTFSNYGMHWVRQAPGKGLEWVAVISNDGNTKTYADSVKGRFTISRDNSKNTLYLQMNSLRAEDTAVYYCAQDETTTVTASYYFDYWGQGTLVTVSSAAAHHHHHH

SEQ ID NO: 1797 - DNA, 1314 bp, Artificial
  Multispecific construct
gaggtgcagctggtggagtctgggggaggtgtggtacggcctggggggtccctgagactctcctgtgcagcctctggattcacctttgatgattatgccatgagttgggtccgccaagctccagggaaggggctggagtgggtctctggtattacttggaatggtggtagcacaggttatgcagactctgtgaaggaccgattcaccatctccagagacaacgccaagaactccctgtatctgcaaatgaacagtctgagagccgaggacacggccttgtattactgtgtgagagacaagtatagctatgcctggtcttatgatgattttgatatctggggccaagggacaatggtcaccgtctcctcaggtggtggcggttcaggcggaggtggctctggaggtggaggttcaggaggtggtggttctggcggcggtggatcgggtggaggtggtagtgaggtgcaactggtcgagtctggtggtggtttggtgcaacctggtagaagcttgcgtttgagttgtgccgcttccggcttcactttccatcattatgctatgcactgggttcgtcaagctcccggaaaaggtttggagtgggtttccggaatttcctggaatggcaataagattacgtacgctgattcagtgaaaggaaggtttacaatcagtagagataatgctaaaaactcattgtatctacaaatgaacagcctaagagcagaagataccgctctgtactactgtgttagagatagctcgttattcattgtaggtgcaccaacttttgaacattggggtcggggtactcttgtgactgtctcatccggtggtggcggttcaggcggaggtggctctggaggtggaggttcaggaggtggtggttctggcggcggtggatcgggtggaggtggtagtgaggtgcagctggtggagtctgggggaggcgttgtccagcctggggggtccctgagactctcctgtgcagcctctggattcaccttcagtaattatggcatgcactgggtccgccaggctccaggcaagggcctggagtgggtggcagtcatatcaaatgatggaaatactaaaacctatgcagattccgtgaagggccgattcaccatctccagagacaattccaagaacacgttatatctgcaaatgaacagcctgagagctgaggacacggctgtgtattactgtgcgcaagatgagacgactacagtaactgcgtcgtattactttgactactggggccagggaaccctggtcaccgtctcctcagcggccgcacaccaccatcatcaccac

SEQ ID NO: 1798 - protein, 442 aa, Artificial
  Multispecific construct
EVQLVESGGGLVQPGGSLRLSCAASGFTLSNYWMNWVRQAPGKGLEWVANINQDGSERYYVDSVKGRFTISRDNAKNSLYLQMNSLRAEDTAVYYCARGGEGYGVDHYGLDVSGQGTTVTVSSGGGGSGGGGSGGGGSGGGGSGGGGSGGGGSEVQLVESGGGLVQPGRSLRLSCAASGFTFDDYALHWVRQAPGKDLEWVSGISWNGGSYGYADSVKGRFTISRDNAKNSLYLQMNSLRAEDTALYYCVREKGPGLTGSTADYYGLDAWGQGTMVTVSSGGGGSGGGGSGGGGSGGGGSGGGGSGGGGSEVQLVESGGGLVQPGRSLRLSCAASGFTFHHYAMHWVRQAPGKGLEWVSGISWNGNKITYADSVKGRFTISRDNAKNSLYLQMNSLRAEDTALYYCVRDSSLFIVGAPTFEHWGRGTLVTVSSAAAHHHHHH

SEQ ID NO: 1799 - DNA, 1326 bp, Artificial
  Multispecific construct
gaggtgcagttagttgagagcggaggtggtttagttcagccggggggctcgcttcgcctgtcgtgcgccgcctcgggattcacattatcaaactactggatgaattgggtccgccaggctccgggcaaaggtcttgagtgggtggcgaacattaatcaggacgggagcgagcgttattacgttgattcggtaaaaggacgtttcactatcagtcgtgacaacgctaaaaattccttgtacttacagatgaactcacttcgtgctgaggacaccgcagtgtactactgtgctcgcggtggtgaaggatacggcgtcgatcactacggccttgatgtatcaggacaggggactacagttaccgtctcttccggtggtggcggttcaggcggaggtggctctggaggtggaggttcaggaggtggtggttctggcggcggtggatcgggtggaggtggtagtgaggtgcagctggtggagtctgggggaggcttggtacagcctggcaggtccctgagactctcctgtgcagcctctggattcacctttgacgattatgccctacactgggtccggcaagctccagggaaggacctggagtgggtctcaggtattagttggaatggtggtagctacggctacgcggactctgtgaagggccgattcaccatctccagagacaacgccaagaactccctgtatctgcaaatgaacagtctgagagctgaggacacggccttgtattattgtgtaagagaaaaggggcccggcttaactggaagtacggccgattactacggtttggacgcctggggccaagggaccatggtcaccgtctcctcaggtggtggcggttcaggcggaggtggctctggaggtggaggttcaggaggtggtggttctggcggcggtggatcgggtggaggtggtagtgaggtgcaactggtcgagtctggtggtggtttggtgcaacctggtagaagcttgcgtttgagttgtgccgcttccggcttcactttccatcattatgctatgcactgggttcgtcaagctcccggaaaaggtttggagtgggtttccggaatttcctggaatggcaataagattacgtacgctgattcagtgaaaggaaggtttacaatcagtagagataatgctaaaaactcattgtatctacaaatgaacagcctaagagcagaagataccgctctgtactactgtgttagagatagctcgttattcattgtaggtgcaccaacttttgaacattggggtcggggtactcttgtgactgtctcatccgcggccgcacaccaccatcatcaccac

SEQ ID NO: 1800 - protein, 437 aa, Artificial
  Multispecific construct
EVQLVESGGGLVQPGGSLRLSCAASGFTLSNYWMNWVRQAPGKGLEWVANINQDGSERYYVDSVKGRFTISRDNAKNSLYLQMNSLRAEDTAVYYCARGGEGYGVDHYGLDVSGQGTTVTVSSGGGGSGGGGSGGGGSGGGGSGGGGSGGGGSEVQLVESGGGVVRPGGSLRLSCAASGFTFDDYAMSWVRQAPGKGLEWVSGITWNAGSTGYADSVKGRFTISRDNAKNSLYLQMNSLRAEDTALYYCVRDKYSYAWSYDDFDIWGQGTMVTVSSGGGGSGGGGSGGGGSGGGGSGGGGSGGGGSEVQLLESGGGLVKPGGSLRLSCAASGFTVSSYTMNWVRQAPGKGLEWVSSISSSGRYIYYADSVKGRFTISRDNAKNSLYLQMNSLRAEDTAVYYCARDPRMVGNPHEFDIWGQGTMVTVSSAAAHHHHHH

SEQ ID NO: 1801 - DNA, 1311 bp, Artificial
  Multispecific construct
gaggtgcagttagttgagagcggaggtggtttagttcagccggggggctcgcttcgcctgtcgtgcgccgcctcgggattcacattatcaaactactggatgaattgggtccgccaggctccgggcaaaggtcttgagtgggtggcgaacattaatcaggacgggagcgagcgttattacgttgattcggtaaaaggacgtttcactatcagtcgtgacaacgctaaaaattccttgtacttacagatgaactcacttcgtgctgaggacaccgcagtgtactactgtgctcgcggtggtgaaggatacggcgtcgatcactacggccttgatgtatcaggacaggggactacagttaccgtctcttccggtggtggcggttcaggcggaggtggctctggaggtggaggttcaggaggtggtggttctggcggcggtggatcgggtggaggtggtagtgaggtgcagctggtggagtctgggggaggtgtggtacggcctggggggtccctgagactctcctgtgcagcctctggattcacctttgatgattatgccatgagttgggtccgccaagctccagggaaggggctggagtgggtctctggtattacttggaatgccggtagcacaggttatgcagactctgtgaagggccgattcaccatctccagagacaacgccaagaactccctgtatctgcaaatgaacagtctgagagccgaggacacggccttgtattactgtgtgagagacaagtatagctatgcctggtcttatgatgattttgatatctggggccaagggacaatggtcaccgtctcctcaggtggtggcggttcaggcggaggtggctctggaggtggaggttcaggaggtggtggttctggcggcggtggatcgggtggaggtggtagtgaggtgcagctgttggagtctgggggaggcctggtcaagccgggggggtccctgagactctcctgtgcagcctctggattcaccgtcagtagctataccatgaactgggtccgccaggctccggggaaggggctggagtgggtctcatccattagtagtagtggtcgttacatatactacgcagactcagtgaagggccgattcaccatctccagagacaacgccaagaactcattatatctgcaaatgaacagcctgagagccgaggacacagctgtatattattgtgcgagagatccccgtatggttgggaacccccatgaatttgatatctggggccaagggacaatggtcaccgtctcctcagcggccgcacaccaccatcatcaccac

SEQ ID NO: 1802 - protein, 438 aa, Artificial
  Multispecific construct
EVQLVESGGGLVQPGGSLRLSCAASGFTLSNYWMNWVRQAPGKGLEWVANINQDGSERYYVDSVKGRFTISRDNAKNSLYLQMNSLRAEDTAVYYCARGGEGYGVDHYGLDVSGQGTTVTVSSGGGGSGGGGSGGGGSGGGGSGGGGSGGGGSEVQLVESGGGVVRPGGSLRLSCAASGFTFDDYAMSWVRQAPGKGLEWVSGITWNAGSTGYADSVKGRFTISRDNAKNSLYLQMNSLRAEDTALYYCVRDKYSYAWSYDDFDIWGQGTMVTVSSGGGGSGGGGSGGGGSGGGGSGGGGSGGGGSEVQLVESGGGLVQPGRSLRLSCAASGFTFHHYAMHWVRQAPGKGLEWVSGISWNGNKITYADSVKGRFTISRDNAKNSLYLQMNSLRAEDTALYYCVRDSSLFIVGAPTFEHWGRGTLVTVSSAAAHHHHHH

SEQ ID NO: 1803 - DNA, 1314 bp, Artificial
  Multispecific construct
gaggtgcagttagttgagagcggaggtggtttagttcagccggggggctcgcttcgcctgtcgtgcgccgcctcgggattcacattatcaaactactggatgaattgggtccgccaggctccgggcaaaggtcttgagtgggtggcgaacattaatcaggacgggagcgagcgttattacgttgattcggtaaaaggacgtttcactatcagtcgtgacaacgctaaaaattccttgtacttacagatgaactcacttcgtgctgaggacaccgcagtgtactactgtgctcgcggtggtgaaggatacggcgtcgatcactacggccttgatgtatcaggacaggggactacagttaccgtctcttccggtggtggcggttcaggcggaggtggctctggaggtggaggttcaggaggtggtggttctggcggcggtggatcgggtggaggtggtagtgaggtgcagctggtggagtctgggggaggtgtggtacggcctggggggtccctgagactctcctgtgcagcctctggattcacctttgatgattatgccatgagttgggtccgccaagctccagggaaggggctggagtgggtctctggtattacttggaatgccggtagcacaggttatgcagactctgtgaagggccgattcaccatctccagagacaacgccaagaactccctgtatctgcaaatgaacagtctgagagccgaggacacggccttgtattactgtgtgagagacaagtatagctatgcctggtcttatgatgattttgatatctggggccaagggacaatggtcaccgtctcctcaggtggtggcggttcaggcggaggtggctctggaggtggaggttcaggaggtggtggttctggcggcggtggatcgggtggaggtggtagtgaggtgcaactggtcgagtctggtggtggtttggtgcaacctggtagaagcttgcgtttgagttgtgccgcttccggcttcactttccatcattatgctatgcactgggttcgtcaagctcccggaaaaggtttggagtgggtttccggaatttcctggaatggcaataagattacgtacgctgattcagtgaaaggaaggtttacaatcagtagagataatgctaaaaactcattgtatctacaaatgaacagcctaagagcagaagataccgctctgtactactgtgttagagatagctcgttattcattgtaggtgcaccaacttttgaacattggggtcggggtactcttgtgactgtctcatccgcggccgcacaccaccatcatcaccac

SEQ ID NO: 1804 - protein, 437 aa, Artificial
  Multispecific construct
EVQLVESGGGLVQPGGSLRLSCAASGFTLSNYWMNWVRQAPGKGLEWVANINQDGSERYYVDSVKGRFTISRDNAKNSLYLQMNSLRAEDTAVYYCARGGEGYGVDHYGLDVSGQGTTVTVSSGGGGSGGGGSGGGGSGGGGSGGGGSGGGGSEVQLVESGGGVVRPGGSLRLSCAASGFTFDDYAMSWVRQAPGKGLEWVSGITWNGGSTGYADSVKDRFTISRDNAKNSLYLQMNSLRAEDTALYYCVRDKYSYAWSYDDFDIWGQGTMVTVSSGGGGSGGGGSGGGGSGGGGSGGGGSGGGGSEVQLVESGGGLVKPGGSLRLSCAASGFTFSNYNMNWVRQAPGKGLEWVSSISSAGTHIYYADSVKGRFTISRDNAKNSLYLQMNSLRAEDTAVYYCARDPHSTGWYKDFDYWGQGTLVTVSSAAAHHHHHH

SEQ ID NO: 1805 - DNA, 1311 bp, Artificial
  Multispecific construct
gaggtgcagttagttgagagcggaggtggtttagttcagccggggggctcgcttcgcctgtcgtgcgccgcctcgggattcacattatcaaactactggatgaattgggtccgccaggctccgggcaaaggtcttgagtgggtggcgaacattaatcaggacgggagcgagcgttattacgttgattcggtaaaaggacgtttcactatcagtcgtgacaacgctaaaaattccttgtacttacagatgaactcacttcgtgctgaggacaccgcagtgtactactgtgctcgcggtggtgaaggatacggcgtcgatcactacggccttgatgtatcaggacaggggactacagttaccgtctcttccggtggtggcggttcaggcggaggtggctctggaggtggaggttcaggaggtggtggttctggcggcggtggatcgggtggaggtggtagtgaggtgcagctggtggagtctgggggaggtgtggtacggcctggggggtccctgagactctcctgtgcagcctctggattcacctttgatgattatgccatgagttgggtccgccaagctccagggaaggggctggagtgggtctctggtattacttggaatggtggtagcacaggttatgcagactctgtgaaggaccgattcaccatctccagagacaacgccaagaactccctgtatctgcaaatgaacagtctgagagccgaggacacggccttgtattactgtgtgagagacaagtatagctatgcctggtcttatgatgattttgatatctggggccaagggacaatggtcaccgtctcctcaggtggtggcggttcaggcggaggtggctctggaggtggaggttcaggaggtggtggttctggcggcggtggatcgggtggaggtggtagtgaggtgcagctggtggagtctgggggaggcctggtcaagcctggggggtccctgagactctcctgtgcagcctctggattcaccttcagtaactataacatgaactgggtccgccaggctccagggaaggggctggagtgggtctcatcgattagtagtgctggtactcacatatactacgcagactcagtgaagggccgattcaccatctccagagacaacgccaagaactcactgtatctgcaaatgaacagcctgagagccgaggacacagctgtttattactgtgcgagagatcctcatagcactggctggtacaaggactttgactactggggccagggaaccctggtcaccgtctcctcagcggccgcacaccaccatcatcaccac

SEQ ID NO: 1806 - protein, 437 aa, Artificial
  Multispecific construct
EVQLVESGGGLVQPGGSLRLSCAASGFTLSNYWMNWVRQAPGKGLEWVANINQDGSERYYVDSVKGRFTISRDNAKNSLYLQMNSLRAEDTAVYYCARGGEGYGVDHYGLDVSGQGTTVTVSSGGGGSGGGGSGGGGSGGGGSGGGGSGGGGSEVQLVESGGGVVRPGGSLRLSCAASGFTFDDYAMSWVRQAPGKGLEWVSGITWNGGSTGYADSVKDRFTISRDNAKNSLYLQMNSLRAEDTALYYCVRDKYSYAWSYDDFDIWGQGTMVTVSSGGGGSGGGGSGGGGSGGGGSGGGGSGGGGSEVQLLESGGGLVKPGGSLRLSCAASGFTVSSYTMNWVRQAPGKGLEWVSSISSSGRYIYYADSVKGRFTISRDNAKNSLYLQMNSLRAEDTAVYYCARDPRMVGNPHEFDIWGQGTMVTVSSAAAHHHHHH

SEQ ID NO: 1807 - DNA, 1311 bp, Artificial
  Multispecific construct
gaggtgcagttagttgagagcggaggtggtttagttcagccggggggctcgcttcgcctgtcgtgcgccgcctcgggattcacattatcaaactactggatgaattgggtccgccaggctccgggcaaaggtcttgagtgggtggcgaacattaatcaggacgggagcgagcgttattacgttgattcggtaaaaggacgtttcactatcagtcgtgacaacgctaaaaattccttgtacttacagatgaactcacttcgtgctgaggacaccgcagtgtactactgtgctcgcggtggtgaaggatacggcgtcgatcactacggccttgatgtatcaggacaggggactacagttaccgtctcttccggtggtggcggttcaggcggaggtggctctggaggtggaggttcaggaggtggtggttctggcggcggtggatcgggtggaggtggtagtgaggtgcagctggtggagtctgggggaggtgtggtacggcctggggggtccctgagactctcctgtgcagcctctggattcacctttgatgattatgccatgagttgggtccgccaagctccagggaaggggctggagtgggtctctggtattacttggaatggtggtagcacaggttatgcagactctgtgaaggaccgattcaccatctccagagacaacgccaagaactccctgtatctgcaaatgaacagtctgagagccgaggacacggccttgtattactgtgtgagagacaagtatagctatgcctggtcttatgatgattttgatatctggggccaagggacaatggtcaccgtctcctcaggtggtggcggttcaggcggaggtggctctggaggtggaggttcaggaggtggtggttctggcggcggtggatcgggtggaggtggtagtgaggtgcagctgttggagtctgggggaggcctggtcaagccgggggggtccctgagactctcctgtgcagcctctggattcaccgtcagtagctataccatgaactgggtccgccaggctccggggaaggggctggagtgggtctcatccattagtagtagtggtcgttacatatactacgcagactcagtgaagggccgattcaccatctccagagacaacgccaagaactcattatatctgcaaatgaacagcctgagagccgaggacacagctgtatattattgtgcgagagatccccgtatggttgggaacccccatgaatttgatatctggggccaagggacaatggtcaccgtctcctcagcggccgcacaccaccatcatcaccac

SEQ ID NO: 1808 - protein, 441 aa, Artificial
  Multispecific construct
EVQLVESGGGLVQPGGSLRLSCAASGFTLSNYWMNWVRQAPGKGLEWVANINQDGSERYYVDSVKGRFTISRDNAKNSLYLQMNSLRAEDTAVYYCARGGEGYGVDHYGLDVSGQGTTVTVSSGGGGSGGGGSGGGGSGGGGSGGGGSGGGGSEVQLLESGGGLVKPGGSLRLSCAASGFTVSSYTMNWVRQAPGKGLEWVSSISSSGRYIYYADSVKGRFTISRDNAKNSLYLQMNSLRAEDTAVYYCARDPRMVGNPHEFDIWGQGTMVTVSSGGGGSGGGGSGGGGSGGGGSGGGGSGGGGSEVQLVESGGGLVQPGRSLRLSCAASGFTFDDYALHWVRQAPGKDLEWVSGISWNGGSYGYADSVKGRFTISRDNAKNSLYLQMNSLRAEDTALYYCVREKGPGLTGSTADYYGLDAWGQGTMVTVSSAAAHHHHHH

SEQ ID NO: 1809 - DNA, 1323 bp, Artificial
  Multispecific construct
gaggtgcagttagttgagagcggaggtggtttagttcagccggggggctcgcttcgcctgtcgtgcgccgcctcgggattcacattatcaaactactggatgaattgggtccgccaggctccgggcaaaggtcttgagtgggtggcgaacattaatcaggacgggagcgagcgttattacgttgattcggtaaaaggacgtttcactatcagtcgtgacaacgctaaaaattccttgtacttacagatgaactcacttcgtgctgaggacaccgcagtgtactactgtgctcgcggtggtgaaggatacggcgtcgatcactacggccttgatgtatcaggacaggggactacagttaccgtctcttccggtggtggcggttcaggcggaggtggctctggaggtggaggttcaggaggtggtggttctggcggcggtggatcgggtggaggtggtagtgaggtgcagctgttggagtctgggggaggcctggtcaagccgggggggtccctgagactctcctgtgcagcctctggattcaccgtcagtagctataccatgaactgggtccgccaggctccggggaaggggctggagtgggtctcatccattagtagtagtggtcgttacatatactacgcagactcagtgaagggccgattcaccatctccagagacaacgccaagaactcattatatctgcaaatgaacagcctgagagccgaggacacagctgtatattattgtgcgagagatccccgtatggttgggaacccccatgaatttgatatctggggccaagggacaatggtcaccgtctcctcaggtggtggcggttcaggcggaggtggctctggaggtggaggttcaggaggtggtggttctggcggcggtggatcgggtggaggtggtagtgaggtgcagctggtggagtctgggggaggcttggtacagcctggcaggtccctgagactctcctgtgcagcctctggattcacctttgacgattatgccctacactgggtccggcaagctccagggaaggacctggagtgggtctcaggtattagttggaatggtggtagctacggctacgcggactctgtgaagggccgattcaccatctccagagacaacgccaagaactccctgtatctgcaaatgaacagtctgagagctgaggacacggccttgtattattgtgtaagagaaaaggggcccggcttaactggaagtacggccgattactacggtttggacgcctggggccaagggaccatggtcaccgtctcctcagcggccgcacaccaccatcatcaccac

SEQ ID NO: 1810 - protein, 437 aa, Artificial
  Multispecific construct
EVQLVESGGGLVQPGGSLRLSCAASGFTLSNYWMNWVRQAPGKGLEWVANINQDGSERYYVDSVKGRFTISRDNAKNSLYLQMNSLRAEDTAVYYCARGGEGYGVDHYGLDVSGQGTTVTVSSGGGGSGGGGSGGGGSGGGGSGGGGSGGGGSEVQLLESGGGLVKPGGSLRLSCAASGFTVSSYTMNWVRQAPGKGLEWVSSISSSGRYIYYADSVKGRFTISRDNAKNSLYLQMNSLRAEDTAVYYCARDPRMVGNPHEFDIWGQGTMVTVSSGGGGSGGGGSGGGGSGGGGSGGGGSGGGGSEVQLVESGGGVVRPGGSLRLSCAASGFTFDDYAMSWVRQAPGKGLEWVSGITWNAGSTGYADSVKGRFTISRDNAKNSLYLQMNSLRAEDTALYYCVRDKYSYAWSYDDFDIWGQGTMVTVSSAAAHHHHHH

SEQ ID NO: 1811 - DNA, 1311 bp, Artificial
  Multispecific construct
gaggtgcagttagttgagagcggaggtggtttagttcagccggggggctcgcttcgcctgtcgtgcgccgcctcgggattcacattatcaaactactggatgaattgggtccgccaggctccgggcaaaggtcttgagtgggtggcgaacattaatcaggacgggagcgagcgttattacgttgattcggtaaaaggacgtttcactatcagtcgtgacaacgctaaaaattccttgtacttacagatgaactcacttcgtgctgaggacaccgcagtgtactactgtgctcgcggtggtgaaggatacggcgtcgatcactacggccttgatgtatcaggacaggggactacagttaccgtctcttccggtggtggcggttcaggcggaggtggctctggaggtggaggttcaggaggtggtggttctggcggcggtggatcgggtggaggtggtagtgaggtgcagctgttggagtctgggggaggcctggtcaagccgggggggtccctgagactctcctgtgcagcctctggattcaccgtcagtagctataccatgaactgggtccgccaggctccggggaaggggctggagtgggtctcatccattagtagtagtggtcgttacatatactacgcagactcagtgaagggccgattcaccatctccagagacaacgccaagaactcattatatctgcaaatgaacagcctgagagccgaggacacagctgtatattattgtgcgagagatccccgtatggttgggaacccccatgaatttgatatctggggccaagggacaatggtcaccgtctcctcaggtggtggcggttcaggcggaggtggctctggaggtggaggttcaggaggtggtggttctggcggcggtggatcgggtggaggtggtagtgaggtgcagctggtggagtctgggggaggtgtggtacggcctggggggtccctgagactctcctgtgcagcctctggattcacctttgatgattatgccatgagttgggtccgccaagctccagggaaggggctggagtgggtctctggtattacttggaatgccggtagcacaggttatgcagactctgtgaagggccgattcaccatctccagagacaacgccaagaactccctgtatctgcaaatgaacagtctgagagccgaggacacggccttgtattactgtgtgagagacaagtatagctatgcctggtcttatgatgattttgatatctggggccaagggacaatggtcaccgtctcctcagcggccgcacaccaccatcatcaccac

SEQ ID NO: 1812 - protein, 437 aa, Artificial
  Multispecific construct
EVQLVESGGGLVQPGGSLRLSCAASGFTLSNYWMNWVRQAPGKGLEWVANINQDGSERYYVDSVKGRFTISRDNAKNSLYLQMNSLRAEDTAVYYCARGGEGYGVDHYGLDVSGQGTTVTVSSGGGGSGGGGSGGGGSGGGGSGGGGSGGGGSEVQLVESGGGLVKPGGSLRLSCAASGFTFSNYNMNWVRQAPGKGLEWVSSISSAGTHIYYADSVKGRFTISRDNAKNSLYLQMNSLRAEDTAVYYCARDPHSTGWYKDFDYWGQGTLVTVSSGGGGSGGGGSGGGGSGGGGSGGGGSGGGGSEVQLVESGGGVVRPGGSLRLSCAASGFTFDDYAMSWVRQAPGKGLEWVSGITWNGGSTGYADSVKDRFTISRDNAKNSLYLQMNSLRAEDTALYYCVRDKYSYAWSYDDFDIWGQGTMVTVSSAAAHHHHHH

SEQ ID NO: 1813 - DNA, 1311 bp, Artificial
  Multispecific construct
gaggtgcagttagttgagagcggaggtggtttagttcagccggggggctcgcttcgcctgtcgtgcgccgcctcgggattcacattatcaaactactggatgaattgggtccgccaggctccgggcaaaggtcttgagtgggtggcgaacattaatcaggacgggagcgagcgttattacgttgattcggtaaaaggacgtttcactatcagtcgtgacaacgctaaaaattccttgtacttacagatgaactcacttcgtgctgaggacaccgcagtgtactactgtgctcgcggtggtgaaggatacggcgtcgatcactacggccttgatgtatcaggacaggggactacagttaccgtctcttccggtggtggcggttcaggcggaggtggctctggaggtggaggttcaggaggtggtggttctggcggcggtggatcgggtggaggtggtagtgaggtgcagctggtggagtctgggggaggcctggtcaagcctggggggtccctgagactctcctgtgcagcctctggattcaccttcagtaactataacatgaactgggtccgccaggctccagggaaggggctggagtgggtctcatcgattagtagtgctggtactcacatatactacgcagactcagtgaagggccgattcaccatctccagagacaacgccaagaactcactgtatctgcaaatgaacagcctgagagccgaggacacagctgtttattactgtgcgagagatcctcatagcactggctggtacaaggactttgactactggggccagggaaccctggtcaccgtctcctcaggtggtggcggttcaggcggaggtggctctggaggtggaggttcaggaggtggtggttctggcggcggtggatcgggtggaggtggtagtgaggtgcagctggtggagtctgggggaggtgtggtacggcctggggggtccctgagactctcctgtgcagcctctggattcacctttgatgattatgccatgagttgggtccgccaagctccagggaaggggctggagtgggtctctggtattacttggaatggtggtagcacaggttatgcagactctgtgaaggaccgattcaccatctccagagacaacgccaagaactccctgtatctgcaaatgaacagtctgagagccgaggacacggccttgtattactgtgtgagagacaagtatagctatgcctggtcttatgatgattttgatatctggggccaagggacaatggtcaccgtctcctcagcggccgcacaccaccatcatcaccac

SEQ ID NO: 1814 - protein, 437 aa, Artificial
  Multispecific construct
EVQLVESGGGLVQPGGSLRLSCAASGFTLSNYWMNWVRQAPGKGLEWVANINQDGSERYYVDSVKGRFTISRDNAKNSLYLQMNSLRAEDTAVYYCARGGEGYGVDHYGLDVSGQGTTVTVSSGGGGSGGGGSGGGGSGGGGSGGGGSGGGGSEVQLLESGGGLVKPGGSLRLSCAASGFTVSSYTMNWVRQAPGKGLEWVSSISSSGRYIYYADSVKGRFTISRDNAKNSLYLQMNSLRAEDTAVYYCARDPRMVGNPHEFDIWGQGTMVTVSSGGGGSGGGGSGGGGSGGGGSGGGGSGGGGSEVQLVESGGGVVRPGGSLRLSCAASGFTFDDYAMSWVRQAPGKGLEWVSGITWNGGSTGYADSVKDRFTISRDNAKNSLYLQMNSLRAEDTALYYCVRDKYSYAWSYDDFDIWGQGTMVTVSSAAAHHHHHH

SEQ ID NO: 1815 - DNA, 1311 bp, Artificial
  Multispecific construct
gaggtgcagttagttgagagcggaggtggtttagttcagccggggggctcgcttcgcctgtcgtgcgccgcctcgggattcacattatcaaactactggatgaattgggtccgccaggctccgggcaaaggtcttgagtgggtggcgaacattaatcaggacgggagcgagcgttattacgttgattcggtaaaaggacgtttcactatcagtcgtgacaacgctaaaaattccttgtacttacagatgaactcacttcgtgctgaggacaccgcagtgtactactgtgctcgcggtggtgaaggatacggcgtcgatcactacggccttgatgtatcaggacaggggactacagttaccgtctcttccggtggtggcggttcaggcggaggtggctctggaggtggaggttcaggaggtggtggttctggcggcggtggatcgggtggaggtggtagtgaggtgcagctgttggagtctgggggaggcctggtcaagccgggggggtccctgagactctcctgtgcagcctctggattcaccgtcagtagctataccatgaactgggtccgccaggctccggggaaggggctggagtgggtctcatccattagtagtagtggtcgttacatatactacgcagactcagtgaagggccgattcaccatctccagagacaacgccaagaactcattatatctgcaaatgaacagcctgagagccgaggacacagctgtatattattgtgcgagagatccccgtatggttgggaacccccatgaatttgatatctggggccaagggacaatggtcaccgtctcctcaggtggtggcggttcaggcggaggtggctctggaggtggaggttcaggaggtggtggttctggcggcggtggatcgggtggaggtggtagtgaggtgcagctggtggagtctgggggaggtgtggtacggcctggggggtccctgagactctcctgtgcagcctctggattcacctttgatgattatgccatgagttgggtccgccaagctccagggaaggggctggagtgggtctctggtattacttggaatggtggtagcacaggttatgcagactctgtgaaggaccgattcaccatctccagagacaacgccaagaactccctgtatctgcaaatgaacagtctgagagccgaggacacggccttgtattactgtgtgagagacaagtatagctatgcctggtcttatgatgattttgatatctggggccaagggacaatggtcaccgtctcctcagcggccgcacaccaccatcatcaccac

SEQ ID NO: 1816 - protein, 437 aa, Artificial
  Multispecific construct
EVQLVESGGGVVRPGGSLRLSCAASGFTFDDYAMSWVRQAPGKGLEWVSGITWNAGSTGYADSVKGRFTISRDNAKNSLYLQMNSLRAEDTALYYCVRDKYSYAWSYDDFDIWGQGTMVTVSSGGGGSGGGGSGGGGSGGGGSGGGGSGGGGSEVQLLESGGGLVKPGGSLRLSCAASGFTVSSYTMNWVRQAPGKGLEWVSSISSSGRYIYYADSVKGRFTISRDNAKNSLYLQMNSLRAEDTAVYYCARDPRMVGNPHEFDIWGQGTMVTVSSGGGGSGGGGSGGGGSGGGGSGGGGSGGGGSEVQLVESGGGVVQPGGSLRLSCAASGFTFSNYGMHWVRQAPGKGLEWVAVISNDGNTKTYADSVKGRFTISRDNSKNTLYLQMNSLRAEDTAVYYCAQDETTTVTASYYFDYWGQGTLVTVSSAAAHHHHHH

SEQ ID NO: 1817 - DNA, 1311 bp, Artificial
  Multispecific construct
gaggtgcagctggtggagtctgggggaggtgtggtacggcctggggggtccctgagactctcctgtgcagcctctggattcacctttgatgattatgccatgagttgggtccgccaagctccagggaaggggctggagtgggtctctggtattacttggaatgccggtagcacaggttatgcagactctgtgaagggccgattcaccatctccagagacaacgccaagaactccctgtatctgcaaatgaacagtctgagagccgaggacacggccttgtattactgtgtgagagacaagtatagctatgcctggtcttatgatgattttgatatctggggccaagggacaatggtcaccgtctcctcaggtggtggcggttcaggcggaggtggctctggaggtggaggttcaggaggtggtggttctggcggcggtggatcgggtggaggtggtagtgaggtgcagctgttggagtctgggggaggcctggtcaagccgggggggtccctgagactctcctgtgcagcctctggattcaccgtcagtagctataccatgaactgggtccgccaggctccggggaaggggctggagtgggtctcatccattagtagtagtggtcgttacatatactacgcagactcagtgaagggccgattcaccatctccagagacaacgccaagaactcattatatctgcaaatgaacagcctgagagccgaggacacagctgtatattattgtgcgagagatccccgtatggttgggaacccccatgaatttgatatctggggccaagggacaatggtcaccgtctcctcaggtggtggcggttcaggcggaggtggctctggaggtggaggttcaggaggtggtggttctggcggcggtggatcgggtggaggtggtagtgaggtgcagctggtggagtctgggggaggcgttgtccagcctggggggtccctgagactctcctgtgcagcctctggattcaccttcagtaattatggcatgcactgggtccgccaggctccaggcaagggcctggagtgggtggcagtcatatcaaatgatggaaatactaaaacctatgcagattccgtgaagggccgattcaccatctccagagacaattccaagaacacgttatatctgcaaatgaacagcctgagagctgaggacacggctgtgtattactgtgcgcaagatgagacgactacagtaactgcgtcgtattactttgactactggggccagggaaccctggtcaccgtctcctcagcggccgcacaccaccatcatcaccac

SEQ ID NO: 1818 - protein, 430 aa, Artificial
  Multispecific construct
EVQLVESGGGLVKPGGSLRLSCAASGFTFSDESMTWMRQAPGKGLEWVSYISSGGGVKFYADSVKGRFTISRDNAKNSLYLQMNSLRAEDTAVYYCAREAPLRLGESPHDAFDISGQGTMVTVSSGGGGSGGGGSGGGGSGGGGSGGGGSGGGGSEVQLVESGGGLVQPGGSLRLSCAASGFTLSNYWMNWVRQAPGKGLEWVANINQDGSERYYVDSVKGRFTISRDNAKNSLYLQMNSLRAEDTAVYYCARGGEGYGVDHYGLDVSGQGTTVTVSSGGGGSGGGGSGGGGSGGGGSGGGGSGGGGSEVQLLESGGGLVKPGGSLRLSCAASGFTVSSYTMNWVRQAPGKGLEWVSSISSSGRYIYYADSVKGRFTISRDNAKNSLYLQMNSLRAEDTAVYYCARDPRMVGNPHEFDIWGQGTMVTVSS

SEQ ID NO: 1819 - protein, 430 aa, Artificial
  Multispecific construct
EVQLVESGGGLVKPGGSLRLSCAASGFTFSDESMTWMRQAPGKGLEWVSYISSGGGVKFYADSVKGRFTISRDNAKNSLYLQMNSLRAEDTAVYYCAREAPLRLGESPHDAFDISGQGTMVTVSSGGGGSGGGGSGGGGSGGGGSGGGGSGGGGSEVQLVESGGGLVQPGGSLRLSCAASGFTLSNYWMNWVRQAPGKGLEWVANINQDGSERYYVDSVKGRFTISRDNAKNSLYLQMNSLRAEDTAVYYCARGGEGYGVDHYGLDVSGQGTTVTVSSGGGGSGGGGSGGGGSGGGGSGGGGSGGGGSEVQLVESGGGLVKPGGSLRLSCAASGFTFSNYNMNWVRQAPGKGLEWVSSISSAGTHIYYADSVKGRFTISRDNAKNSLYLQMNSLRAEDTAVYYCARDPHSTGWYKDFDYWGQGTLVTVSS

SEQ ID NO: 1820 - protein, 5 aa, Homo sapiens
HYAMH

SEQ ID NO: 1821 - protein, 17 aa, Homo sapiens
GISWNGNKITYADSVKG

SEQ ID NO: 1822 - protein, 14 aa, Homo sapiens
DSSLFIVGAPTFEH

SEQ ID NO: 1823 - protein, 123 aa, Homo sapiens
EVQLVESGGGLVQPGRSLRLSCAASGFTFHHYAMHWVRQAPGKGLEWVSGISWNGNKITYADSVKGRFTISRDNAKNSLYLQMNSLRAEDTALYYCVRDSSLFIVGAPTFEHWGRGTLVTVSS

SEQ ID NO: 1824 - protein, 5 aa, Homo sapiens
NYNMN

SEQ ID NO: 1825 - protein, 17 aa, Homo sapiens
SISSAGTHIYYADSVKG

SEQ ID NO: 1826 - protein, 13 aa, Homo sapiens
DPHSTGWYKDFDY

SEQ ID NO: 1827 - protein, 122 aa, Homo sapiens
EVQLVESGGGLVKPGGSLRLSCAASGFTFSNYNMNWVRQAPGKGLEWVSSISSAGTHIYYADSVKGRFTISRDNAKNSLYLQMNSLRAEDTAVYYCARDPHSTGWYKDFDYWGQGTLVTVSS

SEQ ID NO: 1828 - protein, 5 aa, Homo sapiens
SYTMN

SEQ ID NO: 1829 - protein, 17 aa, Homo sapiens
SISSSGRYIYYADSVKG

SEQ ID NO: 1830 - protein, 13 aa, Homo sapiens
DPRMVGNPHEFDI

SEQ ID NO: 1831 - protein, 122 aa, Homo sapiens
EVQLLESGGGLVKPGGSLRLSCAASGFTVSSYTMNWVRQAPGKGLEWVSSISSSGRYIYYADSVKGRFTISRDNAKNSLYLQMNSLRAEDTAVYYCARDPRMVGNPHEFDIWGQGTMVTVSS

SEQ ID NO: 1832 - protein, 5 aa, Homo sapiens
GYGMH

SEQ ID NO: 1833 - protein, 17 aa, Homo sapiens
YISYDGSNKYYADSVKG

SEQ ID NO: 1834 - protein, 18 aa, Homo sapiens
DPAWGLRLGESSSYDFDI

SEQ ID NO: 1835 - protein, 127 aa, Homo sapiens
EVQLVESGGGVVQPGRSLRLSCAASGFSFSGYGMHWVRQAPGKGLEWVAYISYDGSNKYYADSVKGRFTISRDNSKNTLYLQMNSLRAEDTAVYYCAKDPAWGLRLGESSSYDFDIWGQGTMVTVSS

SEQ ID NO: 1836 - protein, 5 aa, Homo sapiens
SYALS

SEQ ID NO: 1837 - protein, 17 aa, Homo sapiens
SIGENDGTTDYADAVKG

SEQ ID NO: 1838 - protein, 4 aa, Homo sapiens
DGVH

SEQ ID NO: 1839 - protein, 113 aa, Homo sapiens
EVQLLESGGGLVQPGGSLRLSCAASGFSFSSYALSWVRQAPGKGLEWVSSIGENDGTTDYADAVKGRFTISRDNSKNTLYLQMNSLRVEDTAVYYCVKDGVHWGQGTLVTVSS

SEQ ID NO: 1840 - protein, 433 aa, Artificial
  Multispecific construct
EVQLVESGGGVVQPGRSLRLSCAASGFSFSGYGMHWVRQAPGKGLEWVAYISYDGSNKYYADSVKGRFTISRDNSKNTLYLQMNSLRAEDTAVYYCAKDPAWGLRLGESSSYDFDIWGQGTMVTVSSGGGGSGGGGSGGGGSGGGGSGGGGSGGGGSEVQLVESGGGVVQPGGSLRLSCAASGFTFSNYGMHWVRQAPGKGLEWVAVISNDGNTKTYADSVKGRFTISRDNSKNTLYLQMNSLRAEDTAVYYCAQDETTTVTASYYFDYWGQGTLVTVSSGGGGSGGGGSGGGGSGGGGSGGGGSGGGGSEVQLVESGGGLVQPGRSLRLSCAASGFTFHHYAMHWVRQAPGKGLEWVSGISWNGNKITYADSVKGRFTISRDNAKNSLYLQMNSLRAEDTALYYCVRDSSLFIVGAPTFEHWGRGTLVTVSS

SEQ ID NO: 1841 - DNA, 1299 bp, Artificial
  Multispecific construct
gaggtgcagctggtggagtctgggggaggcgtggtccagcctgggaggtccctgagactctcctgtgcagcctctggattctccttcagtggctatggcatgcactgggtccgccaggctccaggcaagggactggagtgggtggcatatatatcatatgatggaagtaataaatactatgcagactccgtgaagggccgattcaccatctccagagacaattccaagaacacgctgtatctgcaaatgaacagcctgagagctgaggacacggctgtgtattactgtgcgaaagatccggcctggggattacgtttgggggagtcatcgtcctatgattttgatatctggggccaagggacaatggtcaccgtctcctcaggtggtggcggttcaggcggaggtggctctggaggtggaggttcaggaggtggtggttctggcggcggtggatcgggtggaggtggtagtgaggtgcagctggtggagtctgggggaggcgttgtccagcctggggggtccctgagactctcctgtgcagcctctggattcaccttcagtaattatggcatgcactgggtccgccaggctccaggcaagggcctggagtgggtggcagtcatatcaaatgatggaaatactaaaacctatgcagattccgtgaagggccgattcaccatctccagagacaattccaagaacacgttatatctgcaaatgaacagcctgagagctgaggacacggctgtgtattactgtgcgcaagatgagacgactacagtaactgcgtcgtattactttgactactggggccagggaaccctggtcaccgtctcctcaggtggtggcggttcaggcggaggtggctctggaggtggaggttcaggaggtggtggttctggcggcggtggatcgggtggaggtggtagtgaggtgcaactggtcgagtctggtggtggtttggtgcaacctggtagaagcttgcgtttgagttgtgccgcttccggcttcactttccatcattatgctatgcactgggttcgtcaagctcccggaaaaggtttggagtgggtttccggaatttcctggaatggcaataagattacgtacgctgattcagtgaaaggaaggtttacaatcagtagagataatgctaaaaactcattgtatctacaaatgaacagcctaagagcagaagataccgctctgtactactgtgttagagatagctcgttattcattgtaggtgcaccaacttttgaacattggggtcggggtactcttgtgactgtctcatcc

SEQ ID NO: 1842 - protein, 419 aa, Artificial
  Multispecific construct
EVQLLESGGGLVQPGGSLRLSCAASGFSFSSYALSWVRQAPGKGLEWVSSIGENDGTTDYADAVKGRFTISRDNSKNTLYLQMNSLRVEDTAVYYCVKDGVHWGQGTLVTVSSGGGGSGGGGSGGGGSGGGGSGGGGSGGGGSEVQLVESGGGVVQPGGSLRLSCAASGFTFSNYGMHWVRQAPGKGLEWVAVISNDGNTKTYADSVKGRFTISRDNSKNTLYLQMNSLRAEDTAVYYCAQDETTTVTASYYFDYWGQGTLVTVSSGGGGSGGGGSGGGGSGGGGSGGGGSGGGGSEVQLVESGGGLVQPGRSLRLSCAASGFTFHHYAMHWVRQAPGKGLEWVSGISWNGNKITYADSVKGRFTISRDNAKNSLYLQMNSLRAEDTALYYCVRDSSLFIVGAPTFEHWGRGTLVTVSS

SEQ ID NO: 1843 - DNA, 1257 bp, Artificial
  Multispecific construct
gaggtgcagctgttggagtctgggggaggcttggtacagcctggggggtccctgagactctcctgtgcagcctctggattcagttttagcagctatgccctcagttgggtccgccaggctccagggaaggggctggagtgggtctcaagtattggtgagaatgatggtaccacagactacgcagacgccgtgaagggccgattcaccatctccagagacaattccaagaatacgctgtatctgcaaatgaacagcctgagagtcgaggacacggccgtctattactgtgtgaaagatggtgtccactggggccagggaaccctggtcaccgtctcctcaggtggtggcggttcaggcggaggtggctctggaggtggaggttcaggaggtggtggttctggcggcggtggatcgggtggaggtggtagtgaggtgcagctggtggagtctgggggaggcgttgtccagcctggggggtccctgagactctcctgtgcagcctctggattcaccttcagtaattatggcatgcactgggtccgccaggctccaggcaagggcctggagtgggtggcagtcatatcaaatgatggaaatactaaaacctatgcagattccgtgaagggccgattcaccatctccagagacaattccaagaacacgttatatctgcaaatgaacagcctgagagctgaggacacggctgtgtattactgtgcgcaagatgagacgactacagtaactgcgtcgtattactttgactactggggccagggaaccctggtcaccgtctcctcaggtggtggcggttcaggcggaggtggctctggaggtggaggttcaggaggtggtggttctggcggcggtggatcgggtggaggtggtagtgaggtgcaactggtcgagtctggtggtggtttggtgcaacctggtagaagcttgcgtttgagttgtgccgcttccggcttcactttccatcattatgctatgcactgggttcgtcaagctcccggaaaaggtttggagtgggtttccggaatttcctggaatggcaataagattacgtacgctgattcagtgaaaggaaggtttacaatcagtagagataatgctaaaaactcattgtatctacaaatgaacagcctaagagcagaagataccgctctgtactactgtgttagagatagctcgttattcattgtaggtgcaccaacttttgaacattggggtcggggtactcttgtgactgtctcatcc

SEQ ID NO: 1844 - protein, 432 aa, Artificial
  Multispecific construct
EVQLVESGGGVVQPGRSLRLSCAASGFSFSGYGMHWVRQAPGKGLEWVAYISYDGSNKYYADSVKGRFTISRDNSKNTLYLQMNSLRAEDTAVYYCAKDPAWGLRLGESSSYDFDIWGQGTMVTVSSGGGGSGGGGSGGGGSGGGGSGGGGSGGGGSEVQLVESGGGVVQPGGSLRLSCAASGFTFSNYGMHWVRQAPGKGLEWVAVISNDGNTKTYADSVKGRFTISRDNSKNTLYLQMNSLRAEDTAVYYCAQDETTTVTASYYFDYWGQGTLVTVSSGGGGSGGGGSGGGGSGGGGSGGGGSGGGGSEVQLVESGGGLVKPGGSLRLSCAASGFTFSNYNMNWVRQAPGKGLEWVSSISSAGTHIYYADSVKGRFTISRDNAKNSLYLQMNSLRAEDTAVYYCARDPHSTGWYKDFDYWGQGTLVTVSS

SEQ ID NO: 1845 - DNA, 1296 bp, Artificial
  Multispecific construct
gaggtgcagctggtggagtctgggggaggcgtggtccagcctgggaggtccctgagactctcctgtgcagcctctggattctccttcagtggctatggcatgcactgggtccgccaggctccaggcaagggactggagtgggtggcatatatatcatatgatggaagtaataaatactatgcagactccgtgaagggccgattcaccatctccagagacaattccaagaacacgctgtatctgcaaatgaacagcctgagagctgaggacacggctgtgtattactgtgcgaaagatccggcctggggattacgtttgggggagtcatcgtcctatgattttgatatctggggccaagggacaatggtcaccgtctcctcaggtggtggcggttcaggcggaggtggctctggaggtggaggttcaggaggtggtggttctggcggcggtggatcgggtggaggtggtagtgaggtgcagctggtggagtctgggggaggcgttgtccagcctggggggtccctgagactctcctgtgcagcctctggattcaccttcagtaattatggcatgcactgggtccgccaggctccaggcaagggcctggagtgggtggcagtcatatcaaatgatggaaatactaaaacctatgcagattccgtgaagggccgattcaccatctccagagacaattccaagaacacgttatatctgcaaatgaacagcctgagagctgaggacacggctgtgtattactgtgcgcaagatgagacgactacagtaactgcgtcgtattactttgactactggggccagggaaccctggtcaccgtctcctcaggtggtggcggttcaggcggaggtggctctggaggtggaggttcaggaggtggtggttctggcggcggtggatcgggtggaggtggtagtgaggtgcagctggtggagtctgggggaggcctggtcaagcctggggggtccctgagactctcctgtgcagcctctggattcaccttcagtaactataacatgaactgggtccgccaggctccagggaaggggctggagtgggtctcatcgattagtagtgctggtactcacatatactacgcagactcagtgaagggccgattcaccatctccagagacaacgccaagaactcactgtatctgcaaatgaacagcctgagagccgaggacacagctgtttattactgtgcgagagatcctcatagcactggctggtacaaggactttgactactggggccagggaaccctggtcaccgtctcctca

SEQ ID NO: 1846 - protein, 418 aa, Artificial
  Multispecific construct
EVQLLESGGGLVQPGGSLRLSCAASGFSFSSYALSWVRQAPGKGLEWVSSIGENDGTTDYADAVKGRFTISRDNSKNTLYLQMNSLRVEDTAVYYCVKDGVHWGQGTLVTVSSGGGGSGGGGSGGGGSGGGGSGGGGSGGGGSEVQLVESGGGVVQPGGSLRLSCAASGFTFSNYGMHWVRQAPGKGLEWVAVISNDGNTKTYADSVKGRFTISRDNSKNTLYLQMNSLRAEDTAVYYCAQDETTTVTASYYFDYWGQGTLVTVSSGGGGSGGGGSGGGGSGGGGSGGGGSGGGGSEVQLVESGGGLVKPGGSLRLSCAASGFTFSNYNMNWVRQAPGKGLEWVSSISSAGTHIYYADSVKGRFTISRDNAKNSLYLQMNSLRAEDTAVYYCARDPHSTGWYKDFDYWGQGTLVTVSS

SEQ ID NO: 1847 - DNA, 1254 bp, Artificial
  Multispecific construct
gaggtgcagctgttggagtctgggggaggcttggtacagcctggggggtccctgagactctcctgtgcagcctctggattcagttttagcagctatgccctcagttgggtccgccaggctccagggaaggggctggagtgggtctcaagtattggtgagaatgatggtaccacagactacgcagacgccgtgaagggccgattcaccatctccagagacaattccaagaatacgctgtatctgcaaatgaacagcctgagagtcgaggacacggccgtctattactgtgtgaaagatggtgtccactggggccagggaaccctggtcaccgtctcctcaggtggtggcggttcaggcggaggtggctctggaggtggaggttcaggaggtggtggttctggcggcggtggatcgggtggaggtggtagtgaggtgcagctggtggagtctgggggaggcgttgtccagcctggggggtccctgagactctcctgtgcagcctctggattcaccttcagtaattatggcatgcactgggtccgccaggctccaggcaagggcctggagtgggtggcagtcatatcaaatgatggaaatactaaaacctatgcagattccgtgaagggccgattcaccatctccagagacaattccaagaacacgttatatctgcaaatgaacagcctgagagctgaggacacggctgtgtattactgtgcgcaagatgagacgactacagtaactgcgtcgtattactttgactactggggccagggaaccctggtcaccgtctcctcaggtggtggcggttcaggcggaggtggctctggaggtggaggttcaggaggtggtggttctggcggcggtggatcgggtggaggtggtagtgaggtgcagctggtggagtctgggggaggcctggtcaagcctggggggtccctgagactctcctgtgcagcctctggattcaccttcagtaactataacatgaactgggtccgccaggctccagggaaggggctggagtgggtctcatcgattagtagtgctggtactcacatatactacgcagactcagtgaagggccgattcaccatctccagagacaacgccaagaactcactgtatctgcaaatgaacagcctgagagccgaggacacagctgtttattactgtgcgagagatcctcatagcactggctggtacaaggactttgactactggggccagggaaccctggtcaccgtctcctca

SEQ ID NO: 1848 - protein, 433 aa, Artificial
  Multispecific construct
EVQLVESGGGVVQPGRSLRLSCAASGFSFSGYGMHWVRQAPGKGLEWVAYISYDGSNKYYADSVKGRFTISRDNSKNTLYLQMNSLRAEDTAVYYCAKDPAWGLRLGESSSYDFDIWGQGTMVTVSSGGGGSGGGGSGGGGSGGGGSGGGGSGGGGSEVQLVESGGGLVQPGGSLRLSCAASGFTFSNYGMHWVRQAPGKGLEWVAVISNDGNTKTYADSVKGRFTISRDNSKNMLYLQMNSLRTEDTAVYYCAQDETTTVTASYYFDYWGQGTLVTVSSGGGGSGGGGSGGGGSGGGGSGGGGSGGGGSEVQLVESGGGLVQPGRSLRLSCAASGFTFHHYAMHWVRQAPGKGLEWVSGISWNGNKITYADSVKGRFTISRDNAKNSLYLQMNSLRAEDTALYYCVRDSSLFIVGAPTFEHWGRGTLVTVSS

SEQ ID NO: 1849 - DNA, 1299 bp, Artificial
  Multispecific construct
gaggtgcagctggtggagtctgggggaggcgtggtccagcctgggaggtccctgagactctcctgtgcagcctctggattctccttcagtggctatggcatgcactgggtccgccaggctccaggcaagggactggagtgggtggcatatatatcatatgatggaagtaataaatactatgcagactccgtgaagggccgattcaccatctccagagacaattccaagaacacgctgtatctgcaaatgaacagcctgagagctgaggacacggctgtgtattactgtgcgaaagatccggcctggggattacgtttgggggagtcatcgtcctatgattttgatatctggggccaagggacaatggtcaccgtctcctcaggtggtggcggttcaggcggaggtggctctggaggtggaggttcaggaggtggtggttctggcggcggtggatcgggtggaggtggtagtgaggtgcagctggtggagtctgggggaggcttggtccagcctggggggtccctgagactctcctgtgcagcctctggattcaccttcagtaattatggcatgcactgggtccgccaggctccaggcaagggcctggagtgggtggcagtcatatcaaatgatggaaatactaaaacctatgcagactccgtgaagggccgattcaccatctccagagacaattccaagaacatgttatatctgcaaatgaacagcctgagaactgaggacacggctgtgtattactgtgcgcaagatgagacgactacagtaactgcgtcgtattactttgactactggggccagggaaccctggtcaccgtctcctcaggtggtggcggttcaggcggaggtggctctggaggtggaggttcaggaggtggtggttctggcggcggtggatcgggtggaggtggtagtgaggtgcaactggtcgagtctggtggtggtttggtgcaacctggtagaagcttgcgtttgagttgtgccgcttccggcttcactttccatcattatgctatgcactgggttcgtcaagctcccggaaaaggtttggagtgggtttccggaatttcctggaatggcaataagattacgtacgctgattcagtgaaaggaaggtttacaatcagtagagataatgctaaaaactcattgtatctacaaatgaacagcctaagagcagaagataccgctctgtactactgtgttagagatagctcgttattcattgtaggtgcaccaacttttgaacattggggtcggggtactcttgtgactgtctcatcc

SEQ ID NO: 1850 - protein, 433 aa, Artificial
  Multispecific construct
EVQLVESGGGVVQPGRSLRLSCAASGFSFSGYGMHWVRQAPGKGLEWVAYISYDGSNKYYADSVKGRFTISRDNSKNTLYLQMNSLRAEDTAVYYCAKDPAWGLRLGESSSYDFDIWGQGTMVTVSSGGGGSGGGGSGGGGSGGGGSGGGGSGGGGSEVQLVESGGGLVQPGGSLRLSCAASGFTFSNYGMHWVRQAPGKGLEWVAVISNDGNTKTYADSVKGRFTISRDNSKNTLYLQMNSLRTEDTAVYYCAQDETTTVTASYYFDYWGQGTLVTVSSGGGGSGGGGSGGGGSGGGGSGGGGSGGGGSEVQLVESGGGLVQPGRSLRLSCAASGFTFHHYAMHWVRQAPGKGLEWVSGISWNGNKITYADSVKGRFTISRDNAKNSLYLQMNSLRAEDTALYYCVRDSSLFIVGAPTFEHWGRGTLVTVSS

SEQ ID NO: 1851 - DNA, 1299 bp, Artificial
  Multispecific construct
gaggtgcagctggtggagtctgggggaggcgtggtccagcctgggaggtccctgagactctcctgtgcagcctctggattctccttcagtggctatggcatgcactgggtccgccaggctccaggcaagggactggagtgggtggcatatatatcatatgatggaagtaataaatactatgcagactccgtgaagggccgattcaccatctccagagacaattccaagaacacgctgtatctgcaaatgaacagcctgagagctgaggacacggctgtgtattactgtgcgaaagatccggcctggggattacgtttgggggagtcatcgtcctatgattttgatatctggggccaagggacaatggtcaccgtctcctcaggtggtggcggttcaggcggaggtggctctggaggtggaggttcaggaggtggtggttctggcggcggtggatcgggtggaggtggtagtgaggtgcagctggtggagtctgggggaggcttggtccagcctggggggtccctgagactctcctgtgcagcctctggattcaccttcagtaattatggcatgcactgggtccgccaggctccaggcaagggcctggagtgggtggcagtcatatcaaatgatggaaatactaaaacctatgcagactccgtgaagggccgattcaccatctccagagacaattccaagaacacgttatatctgcaaatgaacagcctgagaactgaggacacggctgtgtattactgtgcgcaagatgagacgactacagtaactgcgtcgtattactttgactactggggccagggaaccctggtcaccgtctcctcaggtggtggcggttcaggcggaggtggctctggaggtggaggttcaggaggtggtggttctggcggcggtggatcgggtggaggtggtagtgaggtgcaactggtcgagtctggtggtggtttggtgcaacctggtagaagcttgcgtttgagttgtgccgcttccggcttcactttccatcattatgctatgcactgggttcgtcaagctcccggaaaaggtttggagtgggtttccggaatttcctggaatggcaataagattacgtacgctgattcagtgaaaggaaggtttacaatcagtagagataatgctaaaaactcattgtatctacaaatgaacagcctaagagcagaagataccgctctgtactactgtgttagagatagctcgttattcattgtaggtgcaccaacttttgaacattggggtcggggtactcttgtgactgtctcatcc

SEQ ID NO: 1852 - protein, 581 aa, Artificial
  Multispecific construct
EVQLVESGGGVVRPGGSLRLSCAASGFTFDDYAMSWVRQAPGKGLEWVSGITWNGGSTGYADSVKDRFTISRDNAKNSLYLQMNSLRAEDTALYYCVRDKYSYAWSYDDFDIWGQGTMVTVSSGGGGSGGGGSGGGGSGGGGSGGGGSGGGGSEVQLVESGGGVVRPGGSLRLSCAASGFTFDDYAMSWVRQAPGKGLEWVSGITWNGGSTGYADSVKDRFTISRDNAKNSLYLQMNSLRAEDTALYYCVRDKYSYAWSYDDFDIWGQGTMVTVSSGGGGSGGGGSGGGGSGGGGSGGGGSGGGGSEVQLVESGGGLVQPGGSLRLSCAASGFTLSNYWMNWVRQAPGKGLEWVANINQDGSERYYVDSVKGRFTISRDNAKNSLYLQMNSLRAEDTAVYYCARGGEGYGVDHYGLDVSGQGTTVTVSSGGGGSGGGGSGGGGSGGGGSGGGGSGGGGSEVQLVESGGGLVKPGGSLRLSCAASGFTFSNYNMNWVRQAPGKGLEWVSSISSAGTHIYYADSVKGRFTISRDNAKNSLYLQMNSLRAEDTAVYYCARDPHSTGWYKDFDYWGQGTLVTVSS

SEQ ID NO: 1853 - protein, 581 aa, Artificial
  Multispecific construct
EVQLVESGGGLVQPGGSLRLSCAASGFTLSNYWMNWVRQAPGKGLEWVANINQDGSERYYVDSVKGRFTISRDNAKNSLYLQMNSLRAEDTAVYYCARGGEGYGVDHYGLDVSGQGTTVTVSSGGGGSGGGGSGGGGSGGGGSGGGGSGGGGSEVQLVESGGGLVKPGGSLRLSCAASGFTFSNYNMNWVRQAPGKGLEWVSSISSAGTHIYYADSVKGRFTISRDNAKNSLYLQMNSLRAEDTAVYYCARDPHSTGWYKDFDYWGQGTLVTVSSGGGGSGGGGSGGGGSGGGGSGGGGSGGGGSEVQLVESGGGVVRPGGSLRLSCAASGFTFDDYAMSWVRQAPGKGLEWVSGITWNGGSTGYADSVKDRFTISRDNAKNSLYLQMNSLRAEDTALYYCVRDKYSYAWSYDDFDIWGQGTMVTVSSGGGGSGGGGSGGGGSGGGGSGGGGSGGGGSEVQLVESGGGVVRPGGSLRLSCAASGFTFDDYAMSWVRQAPGKGLEWVSGITWNGGSTGYADSVKDRFTISRDNAKNSLYLQMNSLRAEDTALYYCVRDKYSYAWSYDDFDIWGQGTMVTVSS

SEQ ID NO: 1854 - protein, 378 aa, Artificial
  Multispecific construct
EVQLVESGGGVVRPGGSLRLSCAASGFTFDDYAMSWVRQAPGKGLEWVSGITWNGGSTGYADSVKDRFTISRDNAKNSLYLQMNSLRAEDTALYYCVRDKYSYAWSYDDFDIWGQGTMVTVSSGGGGSEVQLVESGGGLVQPGGSLRLSCAASGFTLSNYWMNWVRQAPGKGLEWVANINQDGSERYYVDSVKGRFTISRDNAKNSLYLQMNSLRAEDTAVYYCARGGEGYGVDHYGLDVSGQGTTVTVSSGGGGSEVQLVESGGGLVKPGGSLRLSCAASGFTFSNYNMNWVRQAPGKGLEWVSSISSAGTHIYYADSVKGRFTISRDNAKNSLYLQMNSLRAEDTAVYYCARDPHSTGWYKDFDYWGQGTLVTVSS

SEQ ID NO: 1855 - protein, 403 aa, Artificial
  Multispecific construct
EVQLVESGGGVVRPGGSLRLSCAASGFTFDDYAMSWVRQAPGKGLEWVSGITWNGGSTGYADSVKDRFTISRDNAKNSLYLQMNSLRAEDTALYYCVRDKYSYAWSYDDFDIWGQGTMVTVSSGGGGSEVQLVESGGGLVQPGGSLRLSCAASGFTLSNYWMNWVRQAPGKGLEWVANINQDGSERYYVDSVKGRFTISRDNAKNSLYLQMNSLRAEDTAVYYCARGGEGYGVDHYGLDVSGQGTTVTVSSGGGGSGGGGSGGGGSGGGGSGGGGSGGGGSEVQLVESGGGLVKPGGSLRLSCAASGFTFSNYNMNWVRQAPGKGLEWVSSISSAGTHIYYADSVKGRFTISRDNAKNSLYLQMNSLRAEDTAVYYCARDPHSTGWYKDFDYWGQGTLVTVSS

SEQ ID NO: 1856 - protein, 378 aa, Artificial
  Multispecific construct
EVQLVESGGGLVQPGGSLRLSCAASGFTLSNYWMNWVRQAPGKGLEWVANINQDGSERYYVDSVKGRFTISRDNAKNSLYLQMNSLRAEDTAVYYCARGGEGYGVDHYGLDVSGQGTTVTVSSGGGGSEVQLVESGGGLVKPGGSLRLSCAASGFTFSNYNMNWVRQAPGKGLEWVSSISSAGTHIYYADSVKGRFTISRDNAKNSLYLQMNSLRAEDTAVYYCARDPHSTGWYKDFDYWGQGTLVTVSSGGGGSEVQLVESGGGVVRPGGSLRLSCAASGFTFDDYAMSWVRQAPGKGLEWVSGITWNGGSTGYADSVKDRFTISRDNAKNSLYLQMNSLRAEDTALYYCVRDKYSYAWSYDDFDIWGQGTMVTVSS

SEQ ID NO: 1857 - protein, 378 aa, Artificial
  Multispecific construct
EVQLVESGGGVVRPGGSLRLSCAASGFTFDDYAMSWVRQAPGKGLEWVSGITWNGGSTGYADSVKDRFTISRDNAKNSLYLQMNSLRAEDTALYYCVRDKYSYAWSYDDFDIWGQGTMVTVSSGGGGSEVQLVESGGGLVKPGGSLRLSCAASGFTFSNYNMNWVRQAPGKGLEWVSSISSAGTHIYYADSVKGRFTISRDNAKNSLYLQMNSLRAEDTAVYYCARDPHSTGWYKDFDYWGQGTLVTVSSGGGGSEVQLVESGGGVVQPGGSLRLSCAASGFTFSNYGMHWVRQAPGKGLEWVAVISNDGNTKTYADSVKGRFTISRDNSKNTLYLQMNSLRAEDTAVYYCAQDETTTVTASYYFDYWGQGTLVTVSS

SEQ ID NO: 1858 - protein, 430 aa, Artificial; identical to SEQ ID NO: 1818
  Multispecific construct

SEQ ID NO: 1859 - protein, 427 aa, Artificial
  Multispecific construct
EVQLVESGGGVVRPGGSLRLSCAASGFTFDDYAMSWVRQAPGKGLEWVSGITWNGGSTGYADSVKDRFTISRDNAKNSLYLQMNSLRAEDTALYYCVRDKYSYAWSYDDFDIWGQGTMVTVSSGGGGSGGGGSGGGGSGGGGSGGGGSGGGGSEVQLVESGGGLVQPGGSLRLSCASGFTLSNYWMNWVRQAPGKGLEWVANINQDGSERYYVDSVKGRFTISRDNAKNSLYLQMNSLRAEDTAVYYCARGGEGYGVDHYGLDVSGQGTTVTVSSGGGGSGGGGSGGGGSGGGGSGGGGSGGGGSEVQLLESGGGLVKPGGSLRLSCAASGFTVSSYTMNWVRQAPGKGLEWVSSISSSGRYIYYADSVKGRFTISRDNAKNSLYLQMNSLRAEDTAVYYCARDPRMVGNPHEFDIWGQGTMVTVSS

SEQ ID NO: 1860 - protein, 428 aa, Artificial
  Multispecific construct
EVQLVESGGGVVRPGGSLRLSCAASGFTFDDYAMSWVRQAPGKGLEWVSGITWNGGSTGYADSVKDRFTISRDNAKNSLYLQMNSLRAEDTALYYCVRDKYSYAWSYDDFDIWGQGTMVTVSSGGGGSGGGGSGGGGSGGGGSGGGGSGGGGSEVQLVESGGGLVQPGGSLRLSCAASGFTLSNYWMNWVRQAPGKGLEWVANINQDGSERYYVDSVKGRFTISRDNAKNSLYLQMNSLRAEDTAVYYCARGGEGYGVDHYGLDVSGQGTTVTVSSGGGGSGGGGSGGGGSGGGGSGGGGSGGGGSEVQLVESGGGLVKPGGSLRLSCAASGFTFSNYNMNWVRQAPGKGLEWVSSISSAGTHIYYADSVKGRFTISRDNAKNSLYLQMNSLRAEDTAVYYCARDPHSTGWYKDFDYWGQGTLVTVSS

SEQ ID NO: 1861 - protein, 428 aa, Artificial
  Multispecific construct
EVQLVESGGGLVQPGGSLRLSCAASGFTLSNYWMNWVRQAPGKGLEWVANINQDGSERYYVDSVKGRFTISRDNAKNSLYLQMNSLRAEDTAVYYCARGGEGYGVDHYGLDVSGQGTTVTVSSGGGGSGGGGSGGGGSGGGGSGGGGSGGGGSEVQLLESGGGLVKPGGSLRLSCAASGFTVSSYTMNWVRQAPGKGLEWVSSISSSGRYIYYADSVKGRFTISRDNAKNSLYLQMNSLRAEDTAVYYCARDPRMVGNPHEFDIWGQGTMVTVSSGGGGSGGGGSGGGGSGGGGSGGGGSGGGGSEVQLVESGGGVVRPGGSLRLSCAASGFTFDDYAMSWVRQAPGKGLEWVSGITWNGGSTGYADSVKDRFTISRDNAKNSLYLQMNSLRAEDTALYYCVRDKYSYAWSYDDFDIWGQGTMVTVSS

SEQ ID NO: 1862 - protein, 428 aa, Artificial
  Multispecific construct
EVQLVESGGGLVQPGGSLRLSCAASGFTLSNYWMNWVRQAPGKGLEWVANINQDGSERYYVDSVKGRFTISRDNAKNSLYLQMNSLRAEDTAVYYCARGGEGYGVDHYGLDVSGQGTTVTVSSGGGGSGGGGSGGGGSGGGGSGGGGSGGGGSEVQLVESGGGLVKPGGSLRLSCAASGFTFSNYNMNWVRQAPGKGLEWVSSISSAGTHIYYADSVKGRFTISRDNAKNSLYLQMNSLRAEDTAVYYCARDPHSTGWYKDFDYWGQGTLVTVSSGGGGSGGGGSGGGGSGGGGSGGGGSGGGGSEVQLVESGGGVVRPGGSLRLSCAASGFTFDDYAMSWVRQAPGKGLEWVSGITWNGGSTGYADSVKDRFTISRDNAKNSLYLQMNSLRAEDTALYYCVRDKYSYAWSYDDFDIWGQGTMVTVSS

SEQ ID NO: 1863 - protein, 428 aa, Artificial
  Multispecific construct
EVQLVESGGGLVQPGGSLRLSCAASGFTLSNYWMNWVRQAPGKGLEWVANINQDGSERYYVDSVKGRFTISRDNAKNSLYLQMNSLRAEDTAVYYCARGGEGYGVDHYGLDVSGQGTTVTVSSGGGGSGGGGSGGGGSGGGGSGGGGSGGGGSEVQLVESGGGVVRPGGSLRLSCAASGFTFDDYAMSWVRQAPGKGLEWVSGITWNAGSTGYADSVKGRFTISRDNAKNSLYLQMNSLRAEDTALYYCVRDKYSYAWSYDDFDIWGQGTMVTVSSGGGGSGGGGSGGGGSGGGGSGGGGSGGGGSEVQLVESGGGLVKPGGSLRLSCAASGFTFSNYNMNWVRQAPGKGLEWVSSISSAGTHIYYADSVKGRFTISRDNAKNSLYLQMNSLRAEDTAVYYCARDPHSTGWYKDFDYWGQGTLVTVSS

SEQ ID NO: 1864 - protein, 428 aa, Artificial
  Multispecific construct
EVQLVESGGGVVRPGGSLRLSCAASGFTFDDYAMSWVRQAPGKGLEWVSGITWNGGSTGYADSVKDRFTISRDNAKNSLYLQMNSLRAEDTALYYCVRDKYSYAWSYDDFDIWGQGTMVTVSSGGGGSGGGGSGGGGSGGGGSGGGGSGGGGSEVQLVESGGGLVKPGGSLRLSCAASGFTFSNYNMNWVRQAPGKGLEWVSSISSAGTHIYYADSVKGRFTISRDNAKNSLYLQMNSLRAEDTAVYYCARDPHSTGWYKDFDYWGQGTLVTVSSGGGGSGGGGSGGGGSGGGGSGGGGSGGGGSEVQLVESGGGVVQPGGSLRLSCAASGFTFSNYGMHWVRQAPGKGLEWVAVISNDGNTKTYADSVKGRFTISRDNSKNTLYLQMNSLRAEDTAVYYCAQDETTTVTASYYFDYWGQGTLVTVSS

SEQ ID NO: 1865 - protein, 431 aa, Artificial
  Multispecific construct
EVQLVESGGGLVQPGRSLRLSCAASGFTFDDYALHWVRQAPGKDLEWVSGISWNGGSYGYADSVKGRFTISRDNAKNSLYLQMNSLRAEDTALYYCVREKGPGLTGSTADYYGLDAWGQGTMVTVSSGGGGSGGGGSGGGGSGGGGSGGGGSGGGGSEVQLVESGGGLVKPGGSLRSCAASGFTFSNYNMNWVRQAPGKGLEWVSSISSAGTHIYYADSVKGRFTISRDNAKNSLYLQMNSLRAEDTAVYYCARDPHSTGWYKDFDYWGQGTLVTVSSGGGGSGGGGSGGGGSGGGGSGGGGSGGGGSEVQLVESGGGVVQPGGSLRLSCAASGFTFSNYGMHWVRQAPGKGLEWVAVISNDGNTKTYADSVKGRFTISRDNSKNTLYLQMNSLRAEDTAVYYCAQDETTTVTASYYFDYWGQGTLVTVSS

SEQ ID NO: 1866 - protein, 6 aa, Artificial
  tag
HHHHHH

SEQ ID NO: 1867 - protein, 5 aa, Artificial
  linker
GGGGS

SEQ ID NO: 1868 - protein, 10 aa, Artificial
  linker
GGGGSGGGGS

SEQ ID NO: 1869 - protein, 10 aa, Artificial
  linker
SGGGGSGGGG

SEQ ID NO: 1870 - protein, 14 aa, Artificial
  linker
GGGGSGGGGSGGGG

SEQ ID NO: 1871 - protein, 8 aa, Artificial
  linker
GSGSGSGS

SEQ ID NO: 1872 - protein, 8 aa, Artificial
  linker
GGSGSGSG

SEQ ID NO: 1873 - protein, 6 aa, Artificial
  linker
GGSGSG

SEQ ID NO: 1874 - protein, 4 aa, Artificial
  linker
GGSG

SEQ ID NO: 1875 - protein, 255 aa, Homo sapiens
MGNSCYNIVATLLLVLNFERTRSLQDPCSNCPAGTFCDNNRNQICSPCPPNSFSSAGGQRTCDICRQCKGVFRTRKECSSTSNAECDCTPGFHCLGAGCSMCEQDCKQGQELTKKGCKDCCFGTFNDQKRGICRPWTNCSLDGKSVLVNGTKERDVVCGPSPADLSPGASSVTPPAPAREPGHSPQIISFFLALTSTALLFLLFFLTLRFSVVKRGRKKLLYIFKQPFMRPVQTTQEEDGCSCRFPEEEEGGCEL

SEQ ID NO: 1876 - DNA, 767 bp, Homo sapiens
atgggaaacagctgttacaacatagtagccactctgttgctggtcctcaactttgagaggacaagatcattgcaggatccttgtagtaactgcccagctggtacattctgtgataataacaggaatcagatttgcagtccctgtcctccaaatagtttctccagcgcaggtggacaaaggacctgtgacatatgcaggcagtgtaaaggtgttttcaggaccaggaaggagtgttcctccaccagcaatgcagagtgtgactgcactccagggtttcactgcctgggggcaggatgcagcatgtgtgaacaggattgtaaacaaggtcaagaactgacaaaaaaaggttgtaaagactgttgctttgggacatttaacgatcagaaacgtggcatctgtcgaccctggacaaactgttctttggatggaaagtctgtgcttgtgaatgggacgaaggagagggacgtggtctgtggaccatctccagccgacctctctccgggagcatcctctgtgaccccgcctgcccctgcgagagagccaggacactctccgcagatcatctccttctttcttgcgctgacgtcgactgcgttgctcttcctgctgttcttcctcacgctccgtttctctgttgttaaacggggcagaaagaaactcctgtatatattcaaacaccatttatgagaccagtacaaactactcaagaggaagatggctgtagctgccgatttccagaagaagaagaaggaggatgtgaactgtga

SEQ ID NO: 1877 - protein, 288 aa, Homo sapiens
MQIPQAPWPVVWAVLQLGWRPGWFLDSPDRPWNPPTFSPALLVVTEGDNATFTCSFSNTSESFVLNWYRMSPSNQTDKLAAFPEDRSQPGQDCRFRVTQLPNGRDFHMSVVRARRNDSGTYLCGAISLAPKAQIKESLRAELRVTERRAEVPTAHPSPSPRPAGQFQTLVVGVVGGLLGSLVLLVWVLAVICSRAARGTIGARRTGQPLKEDPSAVPVFSVDYGELDFQWREKTPEPPVPCVPEQTEYATIVFPSGMGTSSPARRGSADGPRSAQPLRPEDGHCSWPL

SEQ ID NO: 1878 - DNA, 381 bp, Homo sapiens
  misc_feature (226)..(226): n is a, c, g, or t
gaggtgcagctgttggagtctgggggaggctcggtacagcctggcaggtccctgagactctcctgtgcagcctctggattcacctttgacgatcatgccatgcactgggtccggcaagctccagggaagggcctggaatgggtctcaggtattagttggaatagtggcagtatgggctatgcggactctgtgaaggaccgattcaccatctccagagacaacgccnagagctccctgtatctccaaatgaacagtctgagagctgaggacacggccttgtattattgtgtaagagaaaaggggcccggcttaactggaagtacggccgattactacggtttggacgtctggggccaagggaccatggtcaccgtctcttca

SEQ ID NO: 1879 - DNA, 369 bp, Homo sapiens
gaagtgcagctggtggagtctgggggaggtgtggtacggcctggggggtccctgagactctcctgtgcagcctctggattcacctttgatgattatgccatgagttgggtccgccaagctccagggaaggggctggagtgggtctctggtattacttggaatggtggtagcacaggttatgcagactctgtgaaggaccgattcaccatctccagagacaacgccaagaactccctgtatctgcaaatgaacagtctgagagccgaggacacggccttgtattactgtgtgagagacaagtatagctatgcctggtcttatgatggttttgatatctggggccaagggacaatggtcactgtctcctca

SEQ ID NO: 1880 - DNA, 375 bp, Homo sapiens
caggtgcagctggtggagtctgggggaggcttggtcaagcctggagggtccctgagactctcctgtgcagcctctggattcaccttcagtgactacaccatgacctggatgcggcaggctccagggaaggggctggagtgggtttcctacataagtactggtggtactatcaaatattacacagactctgtgaagggccgattcaccatctccagggacaacgccaagaactcactgtatctgcaaatgaacagcctgagagccgacgacacggccgtgtattactgtgcgcgagaggcccctttacgtttgggggagtccccccatgatgcttttgatatctggggccaagggacaatggtcaccgtctcctca

SEQ ID NO: 1881 - protein, 5 aa, Homo sapiens
VTVSS

SEQ ID NO: 1882 - DNA, 1743 bp, Artificial
  Multispecific construct
gaggtgcagctggtggagtctgggggaggtgtggtacggcctggggggtccctgagactctcctgtgcagcctctggattcacctttgatgattatgccatgagttgggtccgccaagctccagggaaggggctggagtgggtctctggtattacttggaatggtggtagcacaggttatgcagactctgtgaaggaccgattcaccatctccagagacaacgccaagaactccctgtatctgcaaatgaacagtctgagagccgaggacacggccttgtattactgtgtgagagacaagtatagctatgcctggtcttatgatgattttgatatctggggccaagggacaatggtcaccgtctcctcaggtggtggcggttcaggcggaggtggctctggaggtggaggttcaggaggtggtggttctggcggcggtggatcgggtggaggtggtagtgaggtgcagctggtggagtctgggggaggtgtggtacggcctggggggtccctgagactctcctgtgcagcctctggattcacctttgatgattatgccatgagttgggtccgccaagctccagggaaggggctggagtgggtctctggtattacttggaatggtggtagcacaggttatgcagactctgtgaaggaccgattcaccatctccagagacaacgccaagaactccctgtatctgcaaatgaacagtctgagagccgaggacacggccttgtattactgtgtgagagacaagtatagctatgcctggtcttatgatgattttgatatctggggccaagggacaatggtcaccgtctcctcaggtggtggcggttcaggcggaggtggctctggaggtggaggttcaggaggtggtggttctggcggcggtggatcgggtggaggtggtagtgaggtgcagttagttgagagcggaggtggtttagttcagccggggggctcgcttcgcctgtcgtgcgccgcctcgggattcacattatcaaactactggatgaattgggtccgccaggctccgggcaaaggtcttgagtgggtggcgaacattaatcaggacgggagcgagcgttattacgttgattcggtaaaaggacgtttcactatcagtcgtgacaacgctaaaaattccttgtacttacagatgaactcacttcgtgctgaggacaccgcagtgtactactgtgctcgcggtggtgaaggatacggcgtcgatcactacggccttgatgtatcaggacaggggactacagttaccgtctcttccggtggtggcggttcaggcggaggtggctctggaggtggaggttcaggaggtggtggttctggcggcggtggatcgggtggaggtggtagtgaggtgcagctggtggagtctgggggaggcctggtcaagcctggggggtccctgagactctcctgtgcagcctctggattcaccttcagtaactataacatgaactgggtccgccaggctccagggaaggggctggagtgggtctcatcgattagtagtgctggtactcacatatactacgcagactcagtgaagggccgattcaccatctccagagacaacgccaagaactcactgtatctgcaaatgaacagcctgagagccgaggacacagctgtttattactgtgcgagagatcctcatagcactggctggtacaaggactttgactactggggccagggaaccctggtcaccgtctcctca

SEQ ID NO: 1883 - DNA, 1743 bp, Artificial
  Multispecific construct
gaggtgcagttagttgagagcggaggtggtttagttcagccggggggctcgcttcgcctgtcgtgcgccgcctcgggattcacattatcaaactactggatgaattgggtccgccaggctccgggcaaaggtcttgagtgggtggcgaacattaatcaggacgggagcgagcgttattacgttgattcggtaaaaggacgtttcactatcagtcgtgacaacgctaaaaattccttgtacttacagatgaactcacttcgtgctgaggacaccgcagtgtactactgtgctcgcggtggtgaaggatacggcgtcgatcactacggccttgatgtatcaggacaggggactacagttaccgtctcttccggtggtggcggttcaggcggaggtggctctggaggtggaggttcaggaggtggtggttctggcggcggtggatcgggtggaggtggtagtgaggtgcagctggtggagtctgggggaggcctggtcaagcctggggggtccctgagactctcctgtgcagcctctggattcaccttcagtaactataacatgaactgggtccgccaggctccagggaaggggctggagtgggtctcatcgattagtagtgctggtactcacatatactacgcagactcagtgaagggccgattcaccatctccagagacaacgccaagaactcactgtatctgcaaatgaacagcctgagagccgaggacacagctgtttattactgtgcgagagatcctcatagcactggctggtacaaggactttgactactggggccagggaaccctggtcaccgtctcctcaggtggtggcggttcaggcggaggtggctctggaggtggaggttcaggaggtggtggttctggcggcggtggatcgggtggaggtggtagtgaggtgcagctggtggagtctgggggaggtgtggtacggcctggggggtccctgagactctcctgtgcagcctctggattcacctttgatgattatgccatgagttgggtccgccaagctccagggaaggggctggagtgggtctctggtattacttggaatggtggtagcacaggttatgcagactctgtgaaggaccgattcaccatctccagagacaacgccaagaactccctgtatctgcaaatgaacagtctgagagccgaggacacggccttgtattactgtgtgagagacaagtatagctatgcctggtcttatgatgattttgatatctggggccaagggacaatggtcaccgtctcctcaggtggtggcggttcaggcggaggtggctctggaggtggaggttcaggaggtggtggttctggcggcggtggatcgggtggaggtggtagtgaggtgcagctggtggagtctgggggaggtgtggtacggcctggggggtccctgagactctcctgtgcagcctctggattcacctttgatgattatgccatgagttgggtccgccaagctccagggaaggggctggagtgggtctctggtattacttggaatggtggtagcacaggttatgcagactctgtgaaggaccgattcaccatctccagagacaacgccaagaactccctgtatctgcaaatgaacagtctgagagccgaggacacggccttgtattactgtgtgagagacaagtatagctatgcctggtcttatgatgattttgatatctggggccaagggacaatggtcaccgtctcctca

SEQ ID NO: 1884 - DNA, 1134 bp, Artificial
  Multispecific construct
gaggtgcagctggtggagtctgggggaggtgtggtacggcctggggggtccctgagactctcctgtgcagcctctggattcacctttgatgattatgccatgagttgggtccgccaagctccagggaaggggctggagtgggtctctggtattacttggaatggtggtagcacaggttatgcagactctgtgaaggaccgattcaccatctccagagacaacgccaagaactccctgtatctgcaaatgaacagtctgagagccgaggacacggccttgtattactgtgtgagagacaagtatagctatgcctggtcttatgatgattttgatatctggggccaagggacaatggtcaccgtctcctcaggtggaggtggtagtgaggtgcagttagttgagagcggaggtggtttagttcagccggggggctcgcttcgcctgtcgtgcgccgcctcgggattcacattatcaaactactggatgaattgggtccgccaggctccgggcaaaggtcttgagtgggtggcgaacattaatcaggacgggagcgagcgttattacgttgattcggtaaaaggacgtttcactatcagtcgtgacaacgctaaaaattccttgtacttacagatgaactcacttcgtgctgaggacaccgcagtgtactactgtgctcgcggtggtgaaggatacggcgtcgatcactacggccttgatgtatcaggacaggggactacagttaccgtctcttccggtggaggtggtagtgaggtgcagctggtggagtctgggggaggcctggtcaagcctggggggtccctgagactctcctgtgcagcctctggattcaccttcagtaactataacatgaactgggtccgccaggctccagggaaggggctggagtgggtctcatcgattagtagtgctggtactcacatatactacgcagactcagtgaagggccgattcaccatctccagagacaacgccaagaactcactgtatctgcaaatgaacagcctgagagccgaggacacagctgtttattactgtgcgagagatcctcatagcactggctggtacaaggactttgactactggggccagggaaccctggtcaccgtctcctca

SEQ ID NO: 1885 - DNA, 1209 bp, Artificial
  Multispecific construct
gaggtgcagctggtggagtctgggggaggtgtggtacggcctggggggtccctgagactctcctgtgcagcctctggattcacctttgatgattatgccatgagttgggtccgccaagctccagggaaggggctggagtgggtctctggtattacttggaatggtggtagcacaggttatgcagactctgtgaaggaccgattcaccatctccagagacaacgccaagaactccctgtatctgcaaatgaacagtctgagagccgaggacacggccttgtattactgtgtgagagacaagtatagctatgcctggtcttatgatgattttgatatctggggccaagggacaatggtcaccgtctcctcaggtggaggtggtagtgaggtgcagttagttgagagcggaggtggtttagttcagccggggggctcgcttcgcctgtcgtgcgccgcctcgggattcacattatcaaactactggatgaattgggtccgccaggctccgggcaaaggtcttgagtgggtggcgaacattaatcaggacgggagcgagcgttattacgttgattcggtaaaaggacgtttcactatcagtcgtgacaacgctaaaaattccttgtacttacagatgaactcacttcgtgctgaggacaccgcagtgtactactgtgctcgcggtggtgaaggatacggcgtcgatcactacggccttgatgtatcaggacaggggactacagttaccgtctcttccggtggtggcggttcaggcggaggtggctctggaggtggaggttcaggaggtggtggttctggcggcggtggatcgggtggaggtggtagtgaggtgcagctggtggagtctgggggaggcctggtcaagcctggggggtccctgagactctcctgtgcagcctctggattcaccttcagtaactataacatgaactgggtccgccaggctccagggaaggggctggagtgggtctcatcgattagtagtgctggtactcacatatactacgcagactcagtgaagggccgattcaccatctccagagacaacgccaagaactcactgtatctgcaaatgaacagcctgagagccgaggacacagctgtttattactgtgcgagagatcctcatagcactggctggtacaaggactttgactactggggccagggaaccctggtcaccgtctcctca

SEQ ID NO: 1886 - DNA, 1134 bp, Artificial
  Multispecific construct
gaggtgcagttagttgagagcggaggtggtttagttcagccggggggctcgcttcgcctgtcgtgcgccgcctcgggattcacattatcaaactactggatgaattgggtccgccaggctccgggcaaaggtcttgagtgggtggcgaacattaatcaggacgggagcgagcgttattacgttgattcggtaaaaggacgtttcactatcagtcgtgacaacgctaaaaattccttgtacttacagatgaactcacttcgtgctgaggacaccgcagtgtactactgtgctcgcggtggtgaaggatacggcgtcgatcactacggccttgatgtatcaggacaggggactacagttaccgtctcttccggtggaggtggtagtgaggtgcagctggtggagtctgggggaggcctggtcaagcctggggggtccctgagactctcctgtgcagcctctggattcaccttcagtaactataacatgaactgggtccgccaggctccagggaaggggctggagtgggtctcatcgattagtagtgctggtactcacatatactacgcagactcagtgaagggccgattcaccatctccagagacaacgccaagaactcactgtatctgcaaatgaacagcctgagagccgaggacacagctgtttattactgtgcgagagatcctcatagcactggctggtacaaggactttgactactggggccagggaaccctggtcaccgtctcctcaggtggaggtggtagtgaggtgcagctggtggagtctgggggaggtgtggtacggcctggggggtccctgagactctcctgtgcagcctctggattcacctttgatgattatgccatgagttgggtccgccaagctccagggaaggggctggagtgggtctctggtattacttggaatggtggtagcacaggttatgcagactctgtgaaggaccgattcaccatctccagagacaacgccaagaactccctgtatctgcaaatgaacagtctgagagccgaggacacggccttgtattactgtgtgagagacaagtatagctatgcctggtcttatgatgattttgatatctggggccaagggacaatggtcaccgtctcctca

SEQ ID NO: 1887 - DNA, 1134 bp, Artificial
  Multispecific construct
gaggtgcagctggtggagtctgggggaggtgtggtacggcctggggggtccctgagactctcctgtgcagcctctggattcacctttgatgattatgccatgagttgggtccgccaagctccagggaaggggctggagtgggtctctggtattacttggaatggtggtagcacaggttatgcagactctgtgaaggaccgattcaccatctccagagacaacgccaagaactccctgtatctgcaaatgaacagtctgagagccgaggacacggccttgtattactgtgtgagagacaagtatagctatgcctggtcttatgatgattttgatatctggggccaagggacaatggtcaccgtctcctcaggtggaggtggtagtgaggtgcagctggtggagtctgggggaggcctggtcaagcctggggggtccctgagactctcctgtgcagcctctggattcaccttcagtaactataacatgaactgggtccgccaggctccagggaaggggctggagtgggtctcatcgattagtagtgctggtactcacatatactacgcagactcagtgaagggccgattcaccatctccagagacaacgccaagaactcactgtatctgcaaatgaacagcctgagagccgaggacacagctgtttattactgtgcgagagatcctcatagcactggctggtacaaggactttgactactggggccagggaaccctggtcaccgtctcctcaggtggaggtggtagtgaggtgcagctggtggagtctgggggaggcgttgtccagcctggggggtccctgagactctcctgtgcagcctctggattcaccttcagtaattatggcatgcactgggtccgccaggctccaggcaagggcctggagtgggtggcagtcatatcaaatgatggaaatactaaaacctatgcagattccgtgaagggccgattcaccatctccagagacaattccaagaacacgttatatctgcaaatgaacagcctgagagctgaggacacggctgtgtattactgtgcgcaagatgagacgactacagtaactgcgtcgtattactttgactactggggccagggaaccctggtcaccgtctcctca

SEQ ID NO: 1888 - DNA, 1290 bp, Artificial
  Multispecific construct
gaggttcagctagtggagagcggtggtggccttgtgaaacctggtggttccctgagactttcctgtgcagcttccggttttaccttcagcgatgaatctatgacatggatgcgacaagctccaggtaagggattggaatgggtttcatatatcagctcgggaggtggagtgaaattttatgccgactctgtaaagggtagattcactatttcaagagacaacgcaaaaaactccttgtatttacaaatgaattctctcagagccgaggacacagctgtctactactgtgctagagaagcaccacttagactgggtgaatctccacatgatgcctttgacatatcaggacaagggacaatggtcacagtcagtagcggtggtggcggttcaggcggaggtggctctggaggtggaggttcaggaggtggtggttctggcggcggtggatcgggtggaggtggtagtgaggtgcagttagttgagagcggaggtggtttagttcagccggggggctcgcttcgcctgtcgtgcgccgcctcgggattcacattatcaaactactggatgaattgggtccgccaggctccgggcaaaggtcttgagtgggtggcgaacattaatcaggacgggagcgagcgttattacgttgattcggtaaaaggacgtttcactatcagtcgtgacaacgctaaaaattccttgtacttacagatgaactcacttcgtgctgaggacaccgcagtgtactactgtgctcgcggtggtgaaggatacggcgtcgatcactacggccttgatgtatcaggacaggggactacagttaccgtctcttccggtggtggcggttcaggcggaggtggctctggaggtggaggttcaggaggtggtggttctggcggcggtggatcgggtggaggtggtagtgaggtgcagctgttggagtctgggggaggcctggtcaagccgggggggtccctgagactctcctgtgcagcctctggattcaccgtcagtagctataccatgaactgggtccgccaggctccggggaaggggctggagtgggtctcatccattagtagtagtggtcgttacatatactacgcagactcagtgaagggccgattcaccatctccagagacaacgccaagaactcattatatctgcaaatgaacagcctgagagccgaggacacagctgtatattattgtgcgagagatccccgtatggttgggaacccccatgaatttgatatctggggccaagggacaatggtcaccgtctcctca

SEQ ID NO: 1889 - DNA, 1284 bp, Artificial
  Multispecific construct
gaggtgcagctggtggagtctgggggaggtgtggtacggcctggggggtccctgagactctcctgtgcagcctctggattcacctttgatgattatgccatgagttgggtccgccaagctccagggaaggggctggagtgggtctctggtattacttggaatggtggtagcacaggttatgcagactctgtgaaggaccgattcaccatctccagagacaacgccaagaactccctgtatctgcaaatgaacagtctgagagccgaggacacggccttgtattactgtgtgagagacaagtatagctatgcctggtcttatgatgattttgatatctggggccaagggacaatggtcaccgtctcctcaggtggtggcggttcaggcggaggtggctctggaggtggaggttcaggaggtggtggttctggcggcggtggatcgggtggaggtggtagtgaggtgcagttagttgagagcggaggtggtttagttcagccggggggctcgcttcgcctgtcgtgcgccgcctcgggattcacattatcaaactactggatgaattgggtccgccaggctccgggcaaaggtcttgagtgggtggcgaacattaatcaggacgggagcgagcgttattacgttgattcggtaaaaggacgtttcactatcagtcgtgacaacgctaaaaattccttgtacttacagatgaactcacttcgtgctgaggacaccgcagtgtactactgtgctcgcggtggtgaaggatacggcgtcgatcactacggccttgatgtatcaggacaggggactacagttaccgtctcttccggtggtggcggttcaggcggaggtggctctggaggtggaggttcaggaggtggtggttctggcggcggtggatcgggtggaggtggtagtgaggtgcagctgttggagtctgggggaggcctggtcaagccgggggggtccctgagactctcctgtgcagcctctggattcaccgtcagtagctataccatgaactgggtccgccaggctccggggaaggggctggagtgggtctcatccattagtagtagtggtcgttacatatactacgcagactcagtgaagggccgattcaccatctccagagacaacgccaagaactcattatatctgcaaatgaacagcctgagagccgaggacacagctgtatattattgtgcgagagatccccgtatggttgggaacccccatgaatttgatatctggggccaagggacaatggtcaccgtctcctca

SEQ ID NO: 1890 - DNA, 1284 bp, Artificial
  Multispecific construct
gaggtgcagctggtggagtctgggggaggtgtggtacggcctggggggtccctgagactctcctgtgcagcctctggattcacctttgatgattatgccatgagttgggtccgccaagctccagggaaggggctggagtgggtctctggtattacttggaatggtggtagcacaggttatgcagactctgtgaaggaccgattcaccatctccagagacaacgccaagaactccctgtatctgcaaatgaacagtctgagagccgaggacacggccttgtattactgtgtgagagacaagtatagctatgcctggtcttatgatgattttgatatctggggccaagggacaatggtcaccgtctcctcaggtggtggcggttcaggcggaggtggctctggaggtggaggttcaggaggtggtggttctggcggcggtggatcgggtggaggtggtagtgaggtgcagttagttgagagcggaggtggtttagttcagccggggggctcgcttcgcctgtcgtgcgccgcctcgggattcacattatcaaactactggatgaattgggtccgccaggctccgggcaaaggtcttgagtgggtggcgaacattaatcaggacgggagcgagcgttattacgttgattcggtaaaaggacgtttcactatcagtcgtgacaacgctaaaaattccttgtacttacagatgaactcacttcgtgctgaggacaccgcagtgtactactgtgctcgcggtggtgaaggatacggcgtcgatcactacggccttgatgtatcaggacaggggactacagttaccgtctcttccggtggtggcggttcaggcggaggtggctctggaggtggaggttcaggaggtggtggttctggcggcggtggatcgggtggaggtggtagtgaggtgcagctggtggagtctgggggaggcctggtcaagcctggggggtccctgagactctcctgtgcagcctctggattcaccttcagtaactataacatgaactgggtccgccaggctccagggaaggggctggagtgggtctcatcgattagtagtgctggtactcacatatactacgcagactcagtgaagggccgattcaccatctccagagacaacgccaagaactcactgtatctgcaaatgaacagcctgagagccgaggacacagctgtttattactgtgcgagagatcctcatagcactggctggtacaaggactttgactactggggccagggaaccctggtcaccgtctcctca

SEQ ID NO: 1891 - DNA, 1284 bp, Artificial
  Multispecific construct
gaggtgcagttagttgagagcggaggtggtttagttcagccggggggctcgcttcgcctgtcgtgcgccgcctcgggattcacattatcaaactactggatgaattgggtccgccaggctccgggcaaaggtcttgagtgggtggcgaacattaatcaggacgggagcgagcgttattacgttgattcggtaaaaggacgtttcactatcagtcgtgacaacgctaaaaattccttgtacttacagatgaactcacttcgtgctgaggacaccgcagtgtactactgtgctcgcggtggtgaaggatacggcgtcgatcactacggccttgatgtatcaggacaggggactacagttaccgtctcttccggtggtggcggttcaggcggaggtggctctggaggtggaggttcaggaggtggtggttctggcggcggtggatcgggtggaggtggtagtgaggtgcagctgttggagtctgggggaggcctggtcaagccgggggggtccctgagactctcctgtgcagcctctggattcaccgtcagtagctataccatgaactgggtccgccaggctccggggaaggggctggagtgggtctcatccattagtagtagtggtcgttacatatactacgcagactcagtgaagggccgattcaccatctccagagacaacgccaagaactcattatatctgcaaatgaacagcctgagagccgaggacacagctgtatattattgtgcgagagatccccgtatggttgggaacccccatgaatttgatatctggggccaagggacaatggtcaccgtctcctcaggtggtggcggttcaggcggaggtggctctggaggtggaggttcaggaggtggtggttctggcggcggtggatcgggtggaggtggtagtgaggtgcagctggtggagtctgggggaggtgtggtacggcctggggggtccctgagactctcctgtgcagcctctggattcacctttgatgattatgccatgagttgggtccgccaagctccagggaaggggctggagtgggtctctggtattacttggaatggtggtagcacaggttatgcagactctgtgaaggaccgattcaccatctccagagacaacgccaagaactccctgtatctgcaaatgaacagtctgagagccgaggacacggccttgtattactgtgtgagagacaagtatagctatgcctggtcttatgatgattttgatatctggggccaagggacaatggtcaccgtctcctca

SEQ ID NO: 1892 - DNA, 1284 bp, Artificial
  Multispecific construct
gaggtgcagttagttgagagcggaggtggtttagttcagccggggggctcgcttcgcctgtcgtgcgccgcctcgggattcacattatcaaactactggatgaattgggtccgccaggctccgggcaaaggtcttgagtgggtggcgaacattaatcaggacgggagcgagcgttattacgttgattcggtaaaaggacgtttcactatcagtcgtgacaacgctaaaaattccttgtacttacagatgaactcacttcgtgctgaggacaccgcagtgtactactgtgctcgcggtggtgaaggatacggcgtcgatcactacggccttgatgtatcaggacaggggactacagttaccgtctcttccggtggtggcggttcaggcggaggtggctctggaggtggaggttcaggaggtggtggttctggcggcggtggatcgggtggaggtggtagtgaggtgcagctggtggagtctgggggaggcctggtcaagcctggggggtccctgagactctcctgtgcagcctctggattcaccttcagtaactataacatgaactgggtccgccaggctccagggaaggggctggagtgggtctcatcgattagtagtgctggtactcacatatactacgcagactcagtgaagggccgattcaccatctccagagacaacgccaagaactcactgtatctgcaaatgaacagcctgagagccgaggacacagctgtttattactgtgcgagagatcctcatagcactggctggtacaaggactttgactactggggccagggaaccctggtcaccgtctcctcaggtggtggcggttcaggcggaggtggctctggaggtggaggttcaggaggtggtggttctggcggcggtggatcgggtggaggtggtagtgaggtgcagctggtggagtctgggggaggtgtggtacggcctggggggtccctgagactctcctgtgcagcctctggattcacctttgatgattatgccatgagttgggtccgccaagctccagggaaggggctggagtgggtctctggtattacttggaatggtggtagcacaggttatgcagactctgtgaaggaccgattcaccatctccagagacaacgccaagaactccctgtatctgcaaatgaacagtctgagagccgaggacacggccttgtattactgtgtgagagacaagtatagctatgcctggtcttatgatgattttgatatctggggccaagggacaatggtcaccgtctcctca

SEQ ID NO: 1893 - DNA, 1284 bp, Artificial
  Multispecific construct
gaggtgcagttagttgagagcggaggtggtttagttcagccggggggctcgcttcgcctgtcgtgcgccgcctcgggattcacattatcaaactactggatgaattgggtccgccaggctccgggcaaaggtcttgagtgggtggcgaacattaatcaggacgggagcgagcgttattacgttgattcggtaaaaggacgtttcactatcagtcgtgacaacgctaaaaattccttgtacttacagatgaactcacttcgtgctgaggacaccgcagtgtactactgtgctcgcggtggtgaaggatacggcgtcgatcactacggccttgatgtatcaggacaggggactacagttaccgtctcttccggtggtggcggttcaggcggaggtggctctggaggtggaggttcaggaggtggtggttctggcggcggtggatcgggtggaggtggtagtgaggtgcagctggtggagtctgggggaggtgtggtacggcctggggggtccctgagactctcctgtgcagcctctggattcacctttgatgattatgccatgagttgggtccgccaagctccagggaaggggctggagtgggtctctggtattacttggaatgccggtagcacaggttatgcagactctgtgaagggccgattcaccatctccagagacaacgccaagaactccctgtatctgcaaatgaacagtctgagagccgaggacacggccttgtattactgtgtgagagacaagtatagctatgcctggtcttatgatgattttgatatctggggccaagggacaatggtcaccgtctcctcaggtggtggcggttcaggcggaggtggctctggaggtggaggttcaggaggtggtggttctggcggcggtggatcgggtggaggtggtagtgaggtgcagctggtggagtctgggggaggcctggtcaagcctggggggtccctgagactctcctgtgcagcctctggattcaccttcagtaactataacatgaactgggtccgccaggctccagggaaggggctggagtgggtctcatcgattagtagtgctggtactcacatatactacgcagactcagtgaagggccgattcaccatctccagagacaacgccaagaactcactgtatctgcaaatgaacagcctgagagccgaggacacagctgtttattactgtgcgagagatcctcatagcactggctggtacaaggactttgactactggggccagggaaccctggtcaccgtctcctca

SEQ ID NO: 1894 - DNA, 1284 bp, Artificial
  Multispecific construct
gaggtccaattggtcgaaagtggtggtggagttgttaggcccggcggaagtctaaggctttcttgcgccgcttctggttttactttcgacgactacgctatgtcttgggttagacaggcacccggtaaaggacttgaatgggtgtccgggataacctggaacggcggaagtactggatacgctgatagcgttaaagataggtttacgatatcgcgtgataatgctaagaatagcttatacttgcagatgaactcccttagggcagaagataccgctctctactattgcgtacgtgataaatactcttacgcttggtcctacgacgacttcgacatttggggacagggtactatggtgacagtttcatctggtggtggtggaagcggtggtggtggatctggtggcggtgggtctggtggaggaggatcaggtggtggcggttctggcggtggcggaagtgaagtccaactagtagaatccggaggaggtctcgttaaaccgggtggaagcttacgactttcgtgcgccgcatcaggttttacgttttctaattacaatatgaattgggtgaggcaagcacctggtaaaggtttggaatgggtttcttccatctcaagcgcaggaacacatatttattatgctgattcggtcaaaggacgttttacaatttcacgtgataatgctaagaactcgctttacttacagatgaactctttgcgtgcagaagatactgccgtgtactattgcgctagagacccacacagtaccggttggtataaagatttcgattattggggacaaggtacattggttactgtatcttctggcggtggcggatcaggcggtggtggaagcggtggaggaggttcgggtggtggtggttccggaggaggtggttcaggtggtggtggtagtgaggtccagttagtcgaatccggtggtggagtcgttcaacccggtggatcgttgaggctatcatgcgctgcaagcggttttaccttttctaactacgggatgcattgggtgcgtcaagcacccggtaaaggtttggaatgggttgccgttatctccaacgacggtaacacaaagacttacgccgactctgttaaaggtcgttttactatttcgcgtgataactcaaagaataccttgtaccttcagatgaactcccttagggcagaagatactgccgtctactattgcgcacaggacgaaaccaccaccgtcaccgcctcttactatttcgattattggggtcaaggtacgttagttacagtttcttcg

SEQ ID NO: 1895 - DNA, 1296 bp, Artificial
  Multispecific construct
gaggtacaattagttgaaagtggtggcggactcgttcaaccaggtcgttcacttaggcttagctgcgctgcaagtggttttactttcgatgactacgctctgcattgggtaaggcaggcacccggtaaagatttggaatgggtgtccggcatctcttggaacggtggatcttatggttatgctgattccgtcaaaggtcgttttacgatttctagggataatgctaagaactcattgtacttacagatgaactctttgcgagcagaagatacagcactgtactactgcgtccgtgagaaaggtcctggtctgacaggttcgaccgctgactattatggactggatgcatggggtcagggtacgatggttactgtgtcttccggaggaggtggctctggtggtggtggatccggtggtggtggatctggtggaggaggatcgggtggtggtggtagtggcggtggcggaagtgaagtccaactagtagaatccggaggaggtctcgttaaaccgggtggaagcttacgactttcgtgcgccgcatcaggttttacgttttctaattacaatatgaattgggtgaggcaagcacctggtaaaggtttggaatgggtttcttccatctcaagcgcaggaacacatatttattatgctgattcggtcaaaggacgttttacaatttcacgtgataatgctaagaactcgctttacttacagatgaactctttgcgtgcagaagatactgccgtgtactattgcgctagagacccacacagtaccggttggtataaagatttcgattattggggacaaggtacattggttactgtatcttctggcggtggcggatcaggcggtggtggaagcggtggaggaggttcgggtggtggtggttccggaggaggtggttcaggtggtggtggtagtgaggtccagttagtcgaatccggtggtggagtcgttcaacccggtggatcgttgaggctatcatgcgctgcaagcggttttaccttttctaactacgggatgcattgggtgcgtcaagcacccggtaaaggtttggaatgggttgccgttatctccaacgacggtaacacaaagacttacgccgactctgttaaaggtcgttttactatttcgcgtgataactcaaagaataccttgtaccttcagatgaactcccttagggcagaagatactgccgtctactattgcgcacaggacgaaaccaccaccgtcaccgcctcttactatttcgattattggggtcaaggtacgttagttacagtttcttcg

1. An isolated binding molecule comprising
a) a single variable heavy chain domain antibody that binds to CD137 and
b) a single variable heavy chain domain antibody that binds PD-1
wherein the single variable heavy chain domain antibody that binds to CD137 does not cause CD137 signalling when bound to CD137 as a monospecific entity.

2. The isolated binding molecule according to claim 1 wherein the single variable heavy chain domain antibody that binds to PD-1 does not block PD-1 function when used as a monospecific entity.

3. The isolated binding molecule according to claim 1 wherein the single variable heavy chain domain antibody that binds to PD-blocks PD-1 binding to one of its ligands.

4. The isolated binding molecule according to a preceding claim wherein the single variable heavy chain domain antibody that binds to CD137 comprises a set of CDR1, 2 and 3 sequences selected from CDR1, 2, 3 sequences shown in tables 2, 3 or 4 or a sequence with at least 75%, 80%, 90% or 95% homology thereto.

5. The isolated binding molecule according to a preceding claim wherein the single variable heavy chain domain antibody that binds to CD137 comprises a V_{H} sequence as shown in table 2 or a sequence with at least 75%, 80%, 90% or 95% homology thereto.

6. The isolated binding molecule according to a preceding claim wherein the single variable heavy chain domain antibody that binds to CD137 comprises a V_{H} sequence as shown in table 3, 4 or 7 or a sequence with at least 75%, 80%, 90% or 95% homology thereto.

7. The isolated binding molecule according to a preceding claim wherein the moiety that binds to PD-1 is selected from an antibody, an antibody fragment, an antibody mimetic or other polypeptide.

8. The isolated binding molecule according to claim 7 wherein said antibody fragment is selected from a Fab, F(ab′)2, Fv, a single chain Fv fragment (scFv), a single domain antibody or fragment thereof.

9. The isolated binding molecule according to claim 8 wherein said single domain antibody is a V_{H} single domain antibody.

10. The isolated binding molecule according to claim 7 wherein said V_{H} single domain antibody that binds PD-1 and does not block PD-1 function and comprises a comprises a set of CDR1, 2 and 3 sequences selected from CDR1, 2, 3 sequences shown in tables 8, 9 or 10 or a sequence with at least 75%, 80%, 90% or 95% homology thereto.

11. The isolated binding molecule according to any of claims 1, 2, 4 to 10 wherein the single variable heavy chain domain antibody that binds to PD-1 does not block PD-1 function and comprises a full length sequence as listed in table 8, 9 or 10 or a sequence with at least 75%, 80%, 90% or 95% homology thereto.

12. The isolated binding molecule according to any of claims 1, 3, 4 to 9 wherein the single variable heavy chain domain antibody that binds to PD-1 and blocks PD-1 binding to one of its ligands and comprises a CDR or a set of CDRs 1, 2 and 3 selected from table 11 and/or comprises a full length sequence as listed in table 11 or a sequence with at least 75%, 80%, 90% or 95% homology thereto.

13. The isolated binding molecule according to any preceding claim wherein a single domain antibody that has a sequence as shown in table 2, or a sequence with at least 75%, 80%, 90% or 95% sequence homology thereto is linked to a single domain antibody that has a sequence as shown in table 8 or a sequence with at least 75%, 80%, 90% or 95% sequence homology thereto, optionally using a peptide linker.

14. The isolated binding molecule according to any preceding claim capable of binding CD137 with an affinity with a Kd of at least about 10-6 M to about 10-12M.

15. The isolated binding molecule according to any preceding claim capable of binding PD-1 with an affinity with a Kd of about 10-6 M to about 10-12M.

16. The isolated binding molecule according to any preceding claim wherein the single variable heavy chain domain antibody that binds to CD137 is linked to the moiety that binds PD-1 optionally via by a peptide linker or other moiety.

17. The binding molecule according to claim 16 wherein said linker is selected from a (G4S)n linker wherein n is an integer selected from 1 to 50.

18. The isolated binding molecule according to any preceding claim conjugated to one or more moiety selected from a toxin, enzyme, radioisotope, half-life extending moiety, label, therapeutic molecule and other chemical moiety.

19. The isolated binding molecule according to claim 18 wherein said half-life extending moiety is selected from the group consisting of an albumin binding moiety, a transferrin binding moiety, a polyethylene glycol molecule, a recombinant polyethylene glycol molecule, human serum albumin, a fragment of human serum albumin, and an albumin binding peptide and single domain antibody that binds to human serum albumin.

20. The isolated binding molecule according to any preceding claim wherein the single variable heavy chain domain antibody which binds to human CD137 is obtained or obtainable from a transgenic rodent that expresses a transgene comprising human V, D and J regions.

21. The single variable heavy chain domain antibody according to claim 20 wherein said rodent does not produce functional endogenous light and heavy chains.

22. A pharmaceutical composition comprising a binding molecule according to preceding claim and a pharmaceutical carrier.

23. A binding molecule according to any of claims 1 to 21 or a pharmaceutical composition according to claim 19 for use in the treatment of disease.

24. A binding molecule according to any of claims 1 to 21 or a pharmaceutical composition according to claim 22 wherein said disease is cancer, an immune disorder, neurological disease, inflammatory disorder, allergy, transplant rejection, viral infection, (e.g. chronic viral infection) immune deficiency, or other immune system-related disorder.

25. A method for treating cancer comprising administering a therapeutically effective amount of a binding molecule according to any of claims 1 to 21 or a pharmaceutical composition according to claim 22.

26. A nucleic acid molecule comprising a nucleic acid sequence encoding the binding molecule according to any of claims 1 to 21.

27. A vector comprising nucleic acid molecule according to claim 26.

28. A host cell comprising a nucleic acid molecule according to claim 26 or a vector according to claim 27.

29. The host cell according to claim 25 wherein said host cell is a bacterial, yeast, viral or mammalian cell.

30. A method for producing a binding molecule according to any of claims 1 to 21 comprising expressing a nucleic acid encoding said binding molecule in a host cell and isolating the binding molecule from the host cell.

31. A kit comprising a binding molecule according to any one of claims 1 to 21 or a pharmaceutical composition according to claim 22.

32. A use of a binding molecule according to any one of claims 1 to 21 or a pharmaceutical composition according to claim 22 for simultaneously activating downstream signalling pathways of CD137 and PD-1.

33. A method for co-stimulating downstream signalling pathways of CD137 and PD-1 comprising administering a binding molecule according to any of claims 1 to 21 or a pharmaceutical composition according to claim 22.

34. A use of a binding molecule according to any of claims 1 to 21 or a pharmaceutical composition according to claim 22 for inducing a local T cell response in or in the vicinity of a PD-1 positive cell or tissue.

35. An isolated binding molecule comprising
a) an antibody or fragment thereof that binds to CD137 and
b) an antibody or fragment thereof that binds to PD-1.

36. A V_{H} single domain antibody that binds CD137 having a set of CDRs 1, 2 and 3 selected from table 7 and/or which comprises a full length sequence as listed in table 7.

37. A multispecific protein comprising a V_{H} single domain antibody according to claim 36.

38. The multispecific protein according to claim 37 wherein said protein binds to PSMA or PD-1.

39. A binding molecule selected from table 12.
